(19) United States
(12) Patent Application Publication
(10) Pub. No.: US 2022/0238182 A1
(43) Pub. Date: Jul. 28, 2022

(54) SYSTEMS AND METHODS FOR PREDICTING REPAIR OUTCOMES IN GENETIC ENGINEERING

(71) Applicants: The Broad Institute, Inc., Cambridge, MA (US); Massachusetts Institute of Technology, Cambridge, MA (US); The Brigham and Women's Hospital, Inc., Boston, MA (US); President and Fellows of Harvard College, Cambridge, MA (US)

(72) Inventors: Max Walt Shen, Cambridge, MA (US); Jonathan Yee-Ting Flsu, Cambridge, MA (US); Mandana Arbab, Cambridge, MA (US); David K. Gifford, Cambridge, MA (US); David R. Liu, Cambridge, MA (US); Richard Irving Sherwood, Cambridge, MA (US)

(73) Assignees: The Broad Institute, Inc., Cambridge, MA (US); Massachusetts Institute of Technology, Cambridge, MA (US); The Brigham and Women's Hospital, Inc., Boston, MA (US); President and Fellows of Harvard College, Cambridge, MA (US)

(21) Appl. No.: 16/772,747

(22) PCT Filed: Dec. 15, 2018
(86) PCT No.: PCT/US18/65886

§ 371 Date: Jun. 12, 2020

Related U.S. Application Data
(60) Provisional application No. 62/599,623, filed on Dec. 15, 2017.
(60) Provisional application No. 62/669,771, filed on May 10, 2018.

(51) Int. Cl. G16B 20/30; C12N 15/10; G16B 40/20; C12N 9/22; C12N 15/11; A61K 38/46; A61K 31/7088

(52) U.S. Cl. CPC G16B 20/30; C12N 15/1089; G16B 40/20; C12N 9/22; C12N 2800/80; A61K 38/465; A61K 31/7088; C12N 2310/20; C12N 15/11

(57) ABSTRACT

The specification provides methods for introducing a desired genetic change in a nucleotide sequence using a double-strand break (DSB)-inducing genome editing system, the method comprising: identifying one or more available cut sites in a nucleotide sequence; analyzing the nucleotide sequence and available cut sites with a computational model to identify the optimal cut site for introducing the desired genetic change into the nucleotide sequence; and contacting the nucleotide sequence with a DSB-inducing genome editing system, thereby introducing the desired genetic change in the nucleotide sequence at the cut site.

### RELATED APPLICATIONS

[0001] This application is a national stage filing under 35 U.S.C. § 371 of international PCT application, PCT/US2018/065886, filed Dec. 15, 2018, which claims priority under 35 U.S.C. § 119(e) to U.S. Provisional Patent application, U.S. Ser. No. 62/599,623, filed on Dec. 15, 2017, and to U.S. Provisional Patent application, U.S. Ser. No. 62/669,771, filed May 10, 2018, each of which is incorporated herein by reference.

### GOVERNMENT SUPPORT

[0002] This invention was made with government support under HG008754, EB022376, GM118062, HG009490, and DK101684 awarded by the National Institutes of Health, and HR0011-17-2-0049 awarded by the Defense Advanced Research Projects Agency. The government has certain rights in the invention.

### BACKGROUND OF THE INVENTION

[0003] CRISPR (clustered regularly interspaced short palindromic repeats)-Cas9 has revolutionized genome editing, providing powerful research tools and promising agents for the potential treatment of genetic diseases¹⁻³. The DNA-targeting capabilities of Cas9 have been improved by the development of gRNA design principles⁴, modeling of factors leading to off-target DNA cleavage, enhancement of Cas9 sequence fidelity by modifications to the nuclease^{5,6} and gRNA⁷, and the evolution or engineering of Cas9 variants with alternative PAM sequences⁸⁻¹⁰. Similarly, control over the product distribution of genome editing has been advanced by the development of base editing to achieve precise and efficient single-nucleotide mutations^{7,11,12}, and the improvement of template-directed homology-directed repair (HDR) of double strand breaks¹³⁻¹⁵.

[0004] Non-template directed repair systems, including non-homologous end-joining (NHEJ) and microhomology-mediated end-joining (MMEJ), are major pathways involved in the repair of Cas9-mediated double-strand breaks that can result in highly heterogeneous repair outcomes that generate hundreds of genotypes following DNA cleavage at a single site. While end-joining repair of Cas9-mediated double-stranded DNA breaks has been harnessed to facilitate knock-in of DNA templates¹⁸⁻²¹ or deletion of intervening sequence between two cleavage sites²², NHEJ and MMEJ are not generally considered useful for precision genome editing applications. Recent work has found that the heterogeneous distribution of Cas9-mediated editing products at a given target site is reproducible and dependent on local sequence context^{20,21}, but no general methods have been described to predict genotypic products following Cas9-induced double-stranded DNA breaks.

[0005] The generally accepted view is that DNA double-strand break repair (i.e., template-free, non-homology-dependent repair) following cleavage by genome editing systems produces stochastic and heterogenous repair products and is therefore impractical for applications beyond gene disruption. Further, template-free repair processes (e.g., MMEJ and NHEJ) following DNA double-strand break, despite being more efficient than homology-based repair, are generally not viewed as feasible solutions to precision repair applications, such as restoring the function of a defective gene with a gain-of-function genetic change. Accordingly, methods and solutions enabling the judicious application of template-free genome editing systems, including CRISPR/Cas, TALEN, or Zinc-Finger genome editing systems, would significantly advance the field of genome editing.

### SUMMARY OF THE INVENTION

[0006] The present inventors have unexpectedly found through computational analyses that template-free DNA/genome editing systems, e.g., CRISPR/Cas9, Cas-based, Cpf1-based, or other DSB (double-strand break)-based genome editing systems, produce a predictable set of repair genotypes thereby enabling the use of such editing systems for applications involving or requiring precise manipulation of DNA, e.g., the correction of a disease-causing genetic mutation or modifying a wildtype sequence to confer a genetic advantage. This finding is contrary to the accepted view that DNA double-strand break repair (i.e., template-free, non-homology-dependent repair) following cleavage by genome editing systems produces stochastic and heterogenous repair products and are therefore impractical for applications beyond gene disruption. Thus, the specification describes and discloses in various aspects and embodiments computational-based methods and systems for practically harnessing the innate efficiencies of template-free DNA repair systems for carrying out precise DNA and/or genomic editing without the reliance upon homology-based repair.

[0007] Accordingly, the specification provides in one aspect a method of introducing a desired genetic change in a nucleotide sequence using a double-strand brake (DSB)-inducing genome editing system, the method comprising: identifying one or more available cut sites in a nucleotide sequence; analyzing the nucleotide sequence and available cut sites with a computational model to identify the optimal cut site for introducing the desired genetic change into the nucleotide sequence; and contacting the nucleotide sequence with a DSB-inducing genome editing system, thereby introducing the desired genetic change in the nucleotide sequence at the cut site.

[0008] In another aspect, the specification provides a method of treating a genetic disease by correcting a disease-causing mutation using a double-strand brake (DSB)-inducing genome editing system, the method comprising: identifying one or more available cut sites in a nucleotide sequence comprising a disease-causing mutation; analyzing the nucleotide sequence and available cut sites with a computational model to identify the optimal cut site for correcting the disease-causing mutation in the nucleotide sequence; and contacting the nucleotide sequence with a DSB-inducing genome editing system, thereby correcting the disease-causing mutation and treating the disease.

[0009] In yet another aspect, the specification provides a method of altering a genetic trait by introducing a genetic change in a nucleotide sequence using a double-strand brake (DSB)-inducing genome editing system, the method comprising: identifying one or more available cut sites in a nucleotide sequence; analyzing the nucleotide sequence and available cut sites with a computational model to identify the optimal cut site for introducing the genetic change into the nucleotide sequence; and contacting the nucleotide sequence with a DSB-inducing genome editing system, thereby introducing the desired genetic change in the nucleotide sequence at the cut site and consequently altering the associated genetic trait.

[0010] In another aspect, the specification provides a method of selecting a guide RNA for use in a Cas-genome editing system capable of introducing a genetic change into a nucleotide sequence of a target genomic location, the method comprising: identifying in a nucleotide sequence of a target genomic location one or more available cut sites for a Cas-based genome editing system; and analyzing the nucleotide sequence and cut site with a computational model to identify a guide RNA capable of introducing the genetic change into the nucleotide sequence of the target genomic location.

[0011] In still another aspect, the specification provides a method of introducing a genetic change in the genome of a cell with a Cas-based genome editing system comprising: selecting a guide RNA for use in the Cas-based genome editing system in accordance with the method of the above aspect; and contacting the genome of the cell with the guide RNA and the Cas-based genome editing system, thereby introducing the genetic change.

[0012] In various embodiments, the cut sites available in the nucleotide sequence are a function of the particular DSB-inducing genome editing system in use, e.g., a Cas-based genome editing system.

[0013] In certain embodiments, the nucleotide sequence is a genome of a cell.

[0014] In certain other embodiments, the method for introducing the desired genetic change is done in vivo within a cell or an organism (e.g., a mammal), or ex vivo within a cell isolated or separated from an organism (e.g., an isolated mammalian cancer cell), or in vitro on an isolated nucleotide sequence outside the context of a cell.

[0015] In various embodiments, the DSB-inducing genome editing system can be a Cas-based genoe editing system, e.g., a type II Cas-based genome editing system. In other embodiments, the DSB-inducing genome editing system can be a TALENS-based editing system or a Zinc-Finger-based genome editing system. In still other embodiments, the DSB-inducing genome editing system can be any such endonuclease-based system which catalyzes the formation of a double-strand break at a specific one or more cut sites.

[0016] In embodiments involving a Cas-based genome editing system, the method can further comprise selecting a cognate guide RNA capable of directing a double-strand break at the optimal cut site by the Cas-based genome editing system.

[0017] In certain embodiments, the guide RNA is selected from the group consisting the guide RNA sequences listed in any of Tables 1-6. In various embodiments, the guide RNA can be known or can be newly designed.

[0018] In various embodiments, the double-strand brake (DSB)-inducing genome editing system is capable of editing the genome without homology-directed repair.

[0019] In other embodiments, the double-strand brake (DSB)-inducing genome editing system comprises a type I Cas RNA-guided endonuclease, or a variant or orthologue thereof.

[0020] In still other embodiments, the double-strand brake (DSB)-inducing genome editing system comprises a type II Cas RNA-guided endonuclease, or a functional variant or orthologue thereof.

[0021] The double-strand brake (DSB)-inducing genome editing system may comprise a Cas9 RNA-guided endonuclease, or a variant or orthologue thereof in certain embodiments.

[0022] In still other embodiments, the double-strand brake (DSB)-inducing genome editing system can comprise a Cpf1 RNA-guided endonuclease, or a variant or orthologue thereof.

[0023] In yet further embodiments, the double-strand brake (DSB)-inducing genome editing system can comprise a Streptococcus pyogenes Cas9 (SpCas9), Staphylococcus pyogenes Cas9 (SpCas9), Staphylococcus aureus Cas (SaCas9), Francisella novicida Cas9 (FnCas9), or a functional variant or orthologue thereof.

[0024] In various embodiments, the desired genetic change to be introduced into the nucleotide sequence, e.g., a genome, is to a correction to a genetic mutation. In embodiments, the genetic mutation is a single-nucleotide polymorphism, a deletion mutation, an insertion mutation, or a microduplication error.

[0025] In still other embodiments, the genetic change can comprises a 2-60-bp deletion or a 1-bp insertion.

[0026] The genetic change in other embodiments can comprise a deletion of between 2-20, or 4-40, or 8-80, or 16-160, or 32-320, 64-640, or up to 1000, 2000, 3000, 4000, 5000, 6000, 7000, 8000, 9000, or 10,000 or more nucleotides. Preferably, the deletion can restore the function of a defective gene, e.g., a gain-of-function frameshift genetic change.

[0027] In other embodiments, the desired genetic change is a desired modification to a wildtype gene that confers and/or alters one or more traits, e.g., conferring increased resistance to a pathogen or altering a monogenic trait (e.g., eye color) or polygenic trait (e.g., height or weight).

[0028] In embodiments involving correcting a disease-causing mutation, the disease can be a monogenic disease. Such monogenic diseases can include, for example, sickle cell disease, cystic fibrosis, polycystic kidney disease, Tay-Sachs disease, achondroplasia, beta-thalassemia, Hurler syndrome, severe combined immunodeficiency, hemophilia, glycogen storage disease Ia, and Duchenne muscular dystrophy.

[0029] In any of the above aspects and embodiments, the step of identifying the available cut sites can involve identifying one or more PAM sequences in the case of a Cas-based genome editing system.

[0030] In various embodiments of the above methods, the computational model used to analyze the nucleotide sequence is a deep learning computational model, or a neural network model having one or more hidden layers. In various embodiments, the computational model is trained with experimental data to predict the probability of distribution of indel lengths for any given nucleotide sequence and cut site. In still other embodiments, the computational model is trained with experimental data to predict the probability of distribution of genotype frequencies for any given nucleotide sequence and cut site.

[0031] In various embodiments, the computational model comprises one or more training modules for evaluating experimental data.

[0032] In various embodiments, the computational model can comprise: a first training module for computing a microhomology score matrix; a second training module for computing a microhomology independent score matrix; and a third training module for computing a probability distribution over 1-bp insertions, wherein once trained with experimental data the computational model computes a probability distribution over indel genotypes and a probability distribution over indel lengths for any given input nucleotide sequence and cut site.

[0033] In other embodiments, the computational model predicts genomic repair outcomes for any given input nucleotide sequence and cut site.

[0034] In various embodiments, the genomic repair outcomes can comprise microhomology deletions, microhomology-less deletions, and/or 1-bp insertions.

[0035] In still other embodiments, the computational model can comprise one or more modules each comprising one more input features selected from the group consisting of: a target site nucleotide sequence; a cut site; a PAM-sequence; microhomology lengths relative at a cut site, % GC content at a cut site; and microhomology deletion lengths at a cut site, and type of DSB-genome editing system.

[0036] In various embodiments, the nucleotide sequence analyzed by the computational model is between about 25-100 nucleotides, 50-200 nucleotides, 100-400 nucleotides, 200-800 nucleotides, 400-1600 nucleotides, 800-3200 nucleotides, and 1600-6400 nucleotide, or even up to 7K, 8K, 9K, 10K, 11K, 12K, 13K, 14K, 15K, 16K, 17K, 18K, 19K, 20K nucleotides, or more in length.

[0037] In another aspect, the specification relates to guide RNAs which are identified by various methods described herein. In certain embodiments, the guide RNAs can be any of those presented in Tables 1-6, the contents of which form part of this specification.

[0038] According to various embodiments, the RNA can be purely ribonucleic acid molecules. However, in other embodiments, the RNA guides can comprise one or more naturally-occurring or non-naturally occurring modifications. In various embodiments, the modifications can including, but are not limited to, nucleoside analogs, chemically modified bases, intercalated bases, modified sugars, and modified phosphate group linkers. In certain embodiments, the guide RNAs can comprise one or more phosphorothioate and/or 5′-N-phosphporamidite linkages.

[0039] In still other aspects, the specification discloses vectors comprising one or more nucleotide sequences disclosed herein, e.g., vectors encoding one or more guide RNAs, one or more target nucleotide sequences which are being edited, or a combination thereof. The vectors may comprise naturally occurring sequences, or non-naturally occurring sequences, or a combination thereof.

[0040] In still other aspects, the specification discloses host cells comprising the herein disclosed vectors encoding one more nucleotide sequences embodied herein, e.g., one or more guide RNAs, one or more target nucleotide sequences which are being edited, or a combination thereof.

[0041] In other aspects, the specification discloses a Cas-based genome editing system comprising a Cas protein (or homolog, variant, or orthologue thereof) complexed with at least one guide RNA. In certain embodiments, the guide RNA can be any of those disclosed in Tables 1-6, or a functional variant thereof.

[0042] In still other aspects, the specification provides a Cas-based genome editing system comprising an expression vector having at least one expressible nucleotide sequence encoding a Cas protein (or homolog, variant, or orthologue thereof) and at least one other expressible nucleotide sequence encoding a guide RNA, wherein the guide RNA can be identified by the methods disclosed herein for selecting a guide RNA.

[0043] In yet another aspect, the specification provides a Cas-based genome editing system comprising an expression vector having at least one expressible nucleotide sequence encoding a Cas protein (or homolog, variant, or orthologue thereof) and at least one other expressible nucleotide sequence encoding a guide RNA, wherein the guide RNA can be identified by the methods disclosed herein for selecting a guide RNA.

[0044] In still a further aspect, the specification provides a library for training a computational model for selecting a guide RNA sequence for use with a Cas-based genome editing system capable of introducing a genetic change into a genome without homology-directed repair, wherein the library comprises a plurality of vectors each comprising a first nucleotide sequence of a target genomic location having a cut site and a second nucleotide sequence encoding a cognate guide RNA capable of directing a Cas-based genome editing system to carry out a double-strand break at the cut site of the first nucleotide sequence.

[0045] In another aspect, the specification provides a library and its use for training a computational model for selecting an optimized cut site for use with a DSB-based genome editing system (e.g., Cas-based system, TALAN-based system, or a Zinc-Finger-based system) that is capable of introducing a desired genetic change into a nucleotide sequence (e.g., a genome) at the selected cut site without homology-directed repair, wherein the library comprises a plurality of vectors each comprising a nucleotide sequence having a cut site, and optionally a second nucleotide sequence encoding a cognate guide RNA (in embodiments involving a Cas-based genome editing system).

[0046] In a still further aspect, the specification discloses a computational model.

[0047] In certain embodiments, the computational model can predict and/or compute an optimized or preferred cut site for a DSB-based genome editing system for introducing a genetic change into a nucleotide sequence. In preferred embodiments, the repair does not require homology-based repair mechanisms.

[0048] In certain other embodiments, the computational model can predict and/or compute an optimized or preferred cut site for a Cas-based genome editing system for introducing a genetic change into a nucleotide sequence. In preferred embodiments, the repair does not require homology-based repair mechanisms.

[0049] In still other embodiments, the computation model provides for the selection of a optimized or preferred guide RNA for use with a Cas-based genome editing system for introducing a genetic change in a genome. In preferred embodiments, the repair does not require homology-based repair mechanisms.

[0050] In various embodiments, the computational model is a neural network model having one or more hidden layers.

[0051] In other embodiments, the computational model is a deep learning computational model. In various embodiments, that the DSB-based genome editing system (e.g., a Cas-based genome editing system) edits the genome without relying on homology-based repair.

[0052] In various embodiments, that computational model is trained with experimental data to predict the probability of distribution of indel lengths for any given nucleotide sequence and cut site. In other embodiments, computational model is trained with experimental data to predict the probability of distribution of genotype frequencies for any given nucleotide sequence and cut site.

[0053] In embodiments, the computational model comprises one or more training modules for evaluating experimental data.

[0054] In an embodiment, the computational model comprises: a first training module (305) for computing a microhomology score matrix (305); a second training module (310) for computing a microhomology independent score matrix; and a third training module (315) for computing a probability distribution over 1-bp insertions, wherein once trained with experimental data the computational model computes a probability distribution over indel genotypes and a probability distribution over indel lengths for any given input nucleotide sequence and cut site.

[0055] In certain embodiments, the computational model predicts genomic repair outcomes for any given input nucleotide sequence (i.e., context sequence) and cut site.

[0056] In certain embodiments, the genomic repair outcomes comprise microhomology deletions, microhomology-less deletions, and 1-bp insertions.

[0057] In various embodiments, the one or more modules each comprising one more input features selected from the group consisting of: a target site nucleotide sequence; a cut site; a PAM-sequence; microhomology lengths relative at a cut site, % GC content at a cut site; and microhomology deletion lengths at a cut site.

[0058] In certain embodiments, the nucleotide sequence analyzed by the computational model is between about 25-100 nucleotides, 50-200 nucleotides, 100-400 nucleotides, 200-800 nucleotides, 400-1600 nucleotides, 800-3200 nucleotides, and 1600-6400 nucleotide, or more.

[0059] In yet another aspect, the specification discloses a method for training a computational model, comprising: (i) preparing a library comprising a plurality of nucleic acid molecules each encoding a nucleotide target sequence and a cognate guide RNA, wherein each nucleotide target sequence comprises a cut site; (ii) introducing the library into a plurality of host cells; (iii) contacting the library in the host cells with a Cas-based genome editing system to produce a plurality of genomic repair products; (iv) determining the sequences of the genomic repair products; and (iv) training the computational model with input data that comprises at least the sequences of the nucleotide target sequence and/or the genomic repair products and the cut sites.

[0060] In still another aspect, the specification discloses a method for training a computational model, comprising: (i) preparing a library comprising a plurality of nucleic acid molecules each encoding a nucleotide target sequence and a cut site; (ii) introducing the library into a plurality of host cells; (iii) contacting the library in the host cells with a DSB-based genome editing system to produce a plurality of genomic repair products; (iv) determining the sequences of the genomic repair products; and (iv) training the computational model with input data that comprises at least the sequences of the nucleotide target sequence and/or the genomic repair products and the cut sites.

[0061] In certain embodiments, the trained computational models disclosed herein are capable of computing a probability of distribution of indel lengths for any given input nucleotide sequence and input cut site, and/or a probability of distribution of genotype frequencies for any given input nucleotide sequence and input cut site.

[0062] In embodiments relating to Cas-based genomic editing systems, the trained computational model is capable of selecting a guide RNA for use with a Cas-based genome editing system for introducing a genetic change into a genome.

[0063] The computational model provides a means to produce precision genetic change with a DSB-based genomic editing system. The genetic changes can include microhomology deletion, microhomology-less deletion, and 1-bp insertion. In certain embodiments, the genetic change corrects a disease-causing mutation. In other embodiments, the genetic change modifies a wildtype sequence, which may confer a change in a genetic trait (e.g., a monogenic or polygenic trait). The disease-causing mutation that can be corrected using the computational model with a DSB-based genomic editing system can include, but is not limited to, sickle cell disease, cystic fibrosis, polycystic kidney disease, Tay-Sachs disease, achondroplasia, beta-thalassemia, Hurler syndrome, severe combined immunodeficiency, hemophilia, glycogen storage disease Ia, or Duchenne muscular dystrophy.

[0064] In another aspect, the disclosure provides a method for selecting one or more guide RNAs (gRNAs) from a plurality of gRNAs for CRISPR, comprising acts of: for at least one gRNA of the plurality of gRNAs, using a local DNA sequence and a cut site targeted by the at least one gRNA to predict a frequency of one or more repair genotypes resulting from template-free repair following application of CRISPR with the at least one gRNA; and determining whether to select the at least one gRNA based at least in part on the predicted frequency of the one or more repaired genotypes.

[0065] In embodiments, the one or more repair genotypes correspond to one or more healthy alleles of a gene related to a disease. In other embodiments, the predicted frequency of the one or more repair genotypes is at least about 30%, or at least about 40%, or at least about 50%, or more.

[0066] In certain embodiments, the step of predicting the frequency of the one or more repair genotypes comprises: for each deletion length of a plurality of deletion lengths, aligning subsequences of that deletion length on 5′ and 3′ sides of the cut site to identify one or more longest microhomologies; featurizing the identified microhomologies; applying a machine learning model to compute a frequency distribution over the plurality of deletion lengths; and using frequency distribution over the plurality of deletion lengths to determine the frequency of the one or more repair genotypes.

[0067] In certain embodiments, the plurality of gRNAs comprise gRNAs for CRISPR/Cas9, and the application of CRISPR comprises application of CRISPR/Cas9.

[0068] In yet another aspect, the system comprises: at least one processor; and at least one computer-readable storage medium having encoded thereon instructions which, when executed, cause the at least one processor to perform a herein disclosed computational method.

[0069] A method for editing a nucleotide sequence using a DSB-based genomic editing system that introduces a genetic change at a cut site in a nucleotide sequence, wherein the cut site location is informed by a computational model that computes a frequency distribution over the plurality of deletion lengths and/or a frequency distribution of one or more repaired genotypes over the deletion lengths.

### BRIEF DESCRIPTION OF THE DRAWINGS

[0070] FIG. 1 shows an illustrative DNA segment 100, in accordance with some embodiments.

[0071] FIGS. 2A-D show an illustrative matching of 3′ ends of top and bottom strands of a DNA segment at a cut site and an illustrative repair product, in accordance with some embodiments.

[0072] FIG. 3A shows an illustrative machine learning model 300, in accordance with some embodiments.

[0073] FIG. 3B shows an illustrative process 350 for building one or more machine learning models for predicting frequencies of deletion genotypes and/or deletion lengths, in accordance with some embodiments.

[0074] FIG. 4A shows an illustrative neural network 400A for computing microhomology (MH) scores, in accordance with some embodiments.

[0075] FIG. 4B shows an illustrative neural network 400B for computing MH-less scores, in accordance with some embodiments.

[0076] FIG. 4C shows an illustrative process 400C for training two neural networks jointly, in accordance with some embodiments.

[0077] FIG. 4D shows an illustrative implementation of the insertion module 315 shown in FIG. 3A, in accordance with some embodiments.

[0078] FIG. 5 shows an illustrative process 500 for processing data collected from CRISPR/Cas9 experiments, in accordance with some embodiments.

[0079] FIG. 6 shows an illustrative process 600 for using a machine learning model to predict frequencies of indel genotypes and/or indel lengths, in accordance with some embodiments.

[0080] FIG. 7 shows illustrative examples of a blunt-end cut and a staggered cut, in accordance with some embodiments.

[0081] FIG. 8A shows an illustrative plot 800A of predicted repair genotypes, in accordance with some embodiments.

[0082] FIG. 8B shows another illustrative plot 800B of predicted repair genotypes, in accordance with some embodiments.

[0083] FIG. 8C shows another illustrative plot 800C of predicted repair genotypes, in accordance with some embodiments.

[0084] FIG. 8D shows a microhomology identified in the example of FIG. 8C, in accordance with some embodiments.

[0085] FIG. 9 shows another illustrative neural network 900 for computing a frequency distribution over deletion lengths, in accordance with some embodiments.

[0086] FIG. 10 shows, schematically, an illustrative computer 1000 on which any aspect of the present disclosure may be implemented.

[0087] FIGS. 11A-11C show a high-throughput assessment of Cas9-mediated DNA repair products. FIG. 11A, A genome-integrated screening library approach for monitoring Cas9 editing products at thousands of target sequences. FIG. 11B, Frequency of Cas9-mediated repair products by class from 1,996 Lib-A target sequences in mouse embryonic stem cells (mESCs). FIG. 11C, Distribution of Cas9-mediated repair products by class in 88 VO target sequences in K562 cells.

[0088] FIGS. 12A-12D show modeling of Cas9-mediated indels by inDelphi. FIG. 12A, Schematic of computational flow for inDelphi modeling. inDelphi separates Cas9-mediated editing products by indel type and uses machine learning tools trained on experimental Lib-A editing products to predict relative frequencies of editing products for any target site. Major editing products include 1- to 60-bp MH deletions, 1- to 60-bp MH-less deletions, and 1-bp insertions. FIG. 12B, Mechanism depicting microhomology-mediated end-joining repair, which yields distinct repair outcomes that reflect which microhomologous bases are used during repair. FIG. 12C, Observed mean frequency of 1-bp insertion genotypes among 1,981 Lib-A target sequences with varying −4 nucleotides. Error bars show 95% C.I. on sample mean with 1000-fold bootstrapping. Data distributions are shown in FIGS. 18A-18H. FIG. 12D, Comparison of observed 1-bp insertion frequencies among all Cas9-edited products from 1,996 Lib-A target sequences. The box denotes the 25th, 50th, and 75th percentiles, whiskers show 1.5 times the interquartile range, and outliers are depicted as fliers. *P=5.4×10-36; **P=8.6×10-70, two-sided two-sample T-test, test statistic=−13.0 and −18.4, degrees of freedom=777 and 1,994; Hedges' g effect size=0.94 and 0.85, for * and ** respectively. e, Motif representation of base identities that impact the frequency of 1-bp insertions in Lib-A data. Only bases with non-zero linear regression weights in 10,000-fold iterative cross-validation are shown. Median held-out Pearson correlation 0.62, total N=1996.

[0089] FIGS. 13A-13F show that Cas9-mediated editing outcomes are accurately predicted by inDelphi. FIG. 13A, Histogram of the observed fraction of Cas9-mediated editing products whose indel length is included in inDelphi predictions in endogenous VO target sequences in HEK293 (N=86), HCT116 (N=91), and K562 (N=82) cells. FIG. 13B, Distribution of Pearson correlation values comparing inDelphi predictions to observed product frequencies in VO sequence contexts in HEK293T (N=86), HCT116 (N=91), and K562 (N=82) cells. The box denotes the 25th, 50th, and 75th percentiles, and whiskers show 1.5 times the interquartile range. FIG. 13C, Distribution of Pearson correlation values comparing inDelphi predictions to observed indel length frequencies in VO sequence contexts in HEK293 (N=86), HCT116 (N=91), and K562 (N=82) cells. Box plot as in (FIG. 13B). FIG. 13D, Comparison of inDelphi and Microhomology-Predictor frameshift predictions to observed frameshift frequencies among 86 VO target sequences in HEK293 cells. The error band represents the 95% C.I. around the regression estimate with 1,000-fold bootstrapping. FIG. 13E shows 1-bp insertion frequencies among edited outcomes in U2OS and HEK293T cells (n=27 and 26 observations, baseline n=1,958 and 89 target sites, P=4.2×10-8 and 8.1×10-12, respectively), two-sided Welch's t-test. FIG. 13F shows smoothed predicted distribution of the highest frequency indel among major editing outcomes (+1 to −60 indels) for SpCas9 gRNAs targeting the human genome.

[0090] FIGS. 14A-14F show high-precision, template-free Cas9 nuclease-mediated deletion and insertion. FIG. 14A, Schematic of deletion repair at a designed Lib-B target sequence with a 9-bp microduplication and strong sequence microhomology. FIG. 14B, Observed frequency of microduplication collapse among all edited products at 56 Lib-B target sequences designed with 7- to 25-bp microduplications. The error band represents the 95% C.I. around the regression estimate with 1,000-fold bootstrapping. FIG. 14C, Observed frequencies of 1-bp insertions among 205 sequence contexts designed to vary base identity at positions −5 to −2 (relative to the PAM at positions 0-2) in three surrounding low-microhomology sequence contexts. The X-axis is sorted by median 1-bp insertion frequency; see FIGS. 20A-20E for the complete axis. FIG. 14D, Comparison of the observed 1-bp insertion frequency at 205 Lib-B designed sequences as in (FIG. 14C) with varying positions −4 and −3. The box denotes the 25th, 50th, and 75th percentiles, whiskers show 1.5 times the interquartile range, and outliers are depicted as fliers. *P=0.03; **P=2.98×10-7, two-sided two-sample T-test, test statistic=−2.2 and −6.5, degrees of freedom=185 and 32, Hedges' g effect size=0.58 and 2.3, for * and ** respectively. FIG. 14E, Comparison of predicted precision scores to observed precision scores for microhomology deletions in 86 VO target sites in HEK293 cells. FIG. 14F, Distribution of the predicted frequency of the most frequent deletion and insertion outcomes among major editing outcomes (1-bp insertions, 1- to 60-bp MH deletions, and 1- to 60-bp MH-less deletions) at 1,063,802 Cas9 gRNAs targeting human exons and introns.

[0091] FIGS. 15A-15F show precise template-free Cas9-mediated editing of pathogenic alleles to wild-type genotypes. FIG. 15A, Using Cas9-nuclease to correct a pathogenic LDLR allele to wild-type. FIG. 15B, Comparison among ClinVar/HGMD pathogenic alleles of observed and predicted frequencies of repair to wild-type alleles, accompanied by a histogram of observed frequencies. Major editing products include 1-bp insertions, 1- to 60-bp MH deletions, and 1- to 60-bp MH-less deletions. FIG. 15C, Comparison of observed and predicted frequencies of frameshift repair to the wild-type frame among ClinVar/HGMD pathogenic alleles, accompanied by a histogram of observed frequencies. Major editing products are defined as in (FIB. 15B). FIG. 15D, Histograms of observed frequencies of repair to the wild-type genotype for wild-type mESCs and Prdkc−/−Lig4−/− mESCs at Lib-B pathogenic microduplication alleles with predicted repair frequency ≥50% among all major editing products, defined as in (FIG. 15B). Dashed lines indicate sample means which differ significantly. P=7.8×10-12; two-sided two-sample T-test, test statistic=−6.9, degrees of freedom=1,297, Hedges' g effect size=0.39. FIG. 15E, Flow cytometry contour plots showing GFP fluorescence and LDL-DyLight550 uptake in mESCs containing the LDLRdup1662_1669dupGCTGGTGA-P2A-GFP allele (LDLRdup-P2A-GFP) and treated with SpCas9 and gRNA when denoted. FIG. 15F, Fluorescence microscopy of mESCs containing the LDLRdup1662_1669dupGCTGGTGA-P2A-GFP allele treated with SpCas9 and gRNA, or untreated.

[0092] FIGS. 16A-16F show design and cloning of a high-throughput library to assess CRISPR-Cas9-mediated editing products. FIG. 16A, From left to right, distributions of predicted Cas9 on-target efficiency (Azimuth score), number of nucleotides participating in microhomology in 3-30-bp deletions, GC content, and estimated precision of deletion outcomes derived from 169,279 potential SpCas9 gRNA target sites in the human genome with quintiles marked as used to design Lib-A. FIG. 16B, Schematic of the cloning process used to clone Lib-A and Lib-B. The cloning process involves ordering a library of oligonucleotides pairing a gRNA protospacer with its 55-bp target sequence, centered on an NGG PAM. To insert the gRNA hairpin between the gRNA protospacer and the target site, the library undergoes an intermediate Gibson Assembly circularization step, restriction enzyme linearization, and Gibson Assembly into a plasmid backbone containing a U6-promoter to facilitate gRNA expression, a hygromycin resistance cassette, and flanking Tol2 transposon sites to facilitate integration into the genome. FIG. 16C, Analysis of cumulative percentage of all CRISPR-Cas9-mediated deletions from VO target sequences in HEK293 (N=89), HCT116 (N=92), and K562 (N=86) that delete up to the reported number of nucleotides (X-axis). 94% of deletions are 30-bp or shorter. FIG. 16D shows the number of unique high-confidence editing outcomes called by simulating data subsampling in data in lib-A (n=2,000 target sites) in mESCs (combined data from n=3 independent biological replicates) and U2OS cells (combined data from n=2 independent biological replicates). For ‘all’, the original non-subsampled data are presented. Each box depicts data for 2,000 target sites. Outliers are not depicted. FIG. 16E shows Pearson's r of genotype frequencies comparing lib-A in mESCs and U2OS cells with endogenous data in HEK293 (n=87 target sites), HCT116 (n=88), and K562 (n=86) cells. Outliers are depicted as diamonds. 1-bp insertion frequency adjustment was performed at each target site by proportionally scaling them to be equal between two cell types. FIG. 16F shows Pearson's r of genotype frequencies at lib-A target sites, comparing two independent biological replicate experiments in mESCs (n=1,861 target sites, median r=0.89) and U2OS cells (n=1,921, median r=0.77). Outliers are depicted as diamonds. Box plots denote the 25th, 50th and 75th percentiles and whiskers show 1.5 times the interquartile range.

[0093] FIGS. 17A-17D show that high-throughput CRISPR-Cas9 editing outcome screening yields replicate-consistent data that is concordant with the repair spectrum at endogenous human genomic loci. FIG. 17A, Box and swarm plot of the Pearson correlation of the genotypic product frequency spectra at VO target sequences comparing Lib-A in mESCs with endogenous data in HEK293 (N=87), HCT116 (N=88), and K562 (N=86). Each dot represents a target sequence, the box denotes the 25th, 50th and 75th percentiles, whiskers show 1.5 times the interquartile range. FIG. 17B, Pearson correlation of the genotypic product frequency spectra at 1,861 Lib-A target sequences comparing two biological replicate experiments in mESCs. Median r=0.89. The box denotes the 25th, 50th and 75th percentiles, whiskers show 1.5 times the interquartile range, and outliers are depicted as fliers. FIG. 17C, Distribution of Cas9-mediated genotypic products by repair category in endogenous data at VO target sequences in K562 (N=88), HCT116 (N=92), and HEK293 (N=89). FIG. 17D, Frequencies of deletions occurring beyond the Cas9 cutsite by distance as measured by the number of bases between the deleted base nearest to the cutsite and the two bases immediately surrounding the cutsite. Cutsite and distances are oriented with the NGG PAM on the positive side. *P<1×105 for the Pearson correlation between a specific deletion frequency distribution and Cas9 editing rates across target sequences (VO-HEK293T N=96, Lib-A mESC N=2000). Box plot as in (FIG. 17A), with outliers beyond whiskers not depicted.

[0094] FIGS. 18A-18I show that sequence features correlated with higher and lower inDelphi phi scores. FIG. 18A, Diagram of all unique alignment outcomes at an example 7-bp deletion accompanied with a table of their MH-less end-joining type, MH length, deletion length, and delta-position. FIG. 18B, Plot of function learned by the neural network modeling MH deletions (MH-NN) mapping MH length and % GC to a numeric score (psi). FIG. 18C, Plot of function learned by the neural network modeling MH-independent deletions (MHless-NN) mapping deletion length to a numeric score (psi). FIG. 18D, Histogram of MHless-NN phi scores by deletion length, normalized to sum to 1. FIG. 18E, Observed frequency of 1-bp insertion genotypes in 1,981 Lib-A target sequences with varying −4 nucleotides. The box denotes the 25th, 50th and 75th percentiles, whiskers show 1.5 times the interquartile range, and outliers are depicted as fliers. FIG. 18F, Plot showing 1-bp insertion frequency in 1,996 Lib-A target sequences compared to their total phi score. Pearson correlation=−0.084 (P=1.7×10-4). FIG. 18G, Relationship between 1-bp insertion frequency in 1,996 Lib-A target sequences compared to the predicted deletion length precision score. Pearson correlation=0.069 (P=2.1×10-3). FIG. 18H, Diagram of hypothesized repair mechanisms that give rise to the outcome categories used by inDelphi, based on known mechanisms of MMEJ, microhomology-mediated alt-NHEJ and c-NHEJ repair pathways. Microhomology-mediated repair begins with 5′-end resection, allowing overlap of 3′-overhangs. Microhomologous basepairing of the 3′-overhangs temporarily stabilizes the ssDNA ends. In microhomology deletion, non-paired 3′-overhangs are removed and polymerase and ligase fill in and connect the gaps to reconstitute a dsDNA strand. In microhomology-less deletions, one 3′-overhang is ligated to the dsDNA backbone and the opposing strand is removed entirely, giving rise to a unilateral deletion with loss of bases on one side of the cutsite only. DNA polymerase and ligation bridge the ssDNA to create a contiguous dsDNA strand. Microhomology-independent mutations occur as a combined result of exonuclease, polymerase, and ligase activity that results in the joining of modified ends at the double strand break cutsite, giving rise to microhomology-less deletions, insertions, and mixtures thereof. FIG. 18I shows the categories of Cas9-mediated genotypic outcomes in data from U2OS cells (n=1,958 lib-A target sites), which can be compared to the categories of Cas9-mediated genotypic outcomes shown in FIG. 17C with regard to data from endogenous contexts at VO target sites in K562 (n=88 target sites), HCT116 (n=92), HEK293 (n=89) cells.

[0095] FIGS. 19A-19F show performance of inDelphi at predicting Cas9-mediated indel length and repair genotypes. FIG. 19A, Box and swarm plot of the Pearson correlation at 189 held-out Lib-A target sequences comparing inDelphi predictions with observed mESC Lib-A genotype product frequencies. The box denotes the 25th, 50th and 75th percentiles, whiskers show 1.5 times the interquartile range. FIG. 19B, Box and swarm plot of the Pearson correlation at 189 held-out Lib-A target sequences comparing inDelphi predictions with observed mESC Lib-A indel length frequencies for 1-bp insertions to 60-bp deletions. Box plot as in (FIG. 19A). FIG. 19C, Distribution of predicted frameshift frequencies among 1-60-bp deletions for SpCas9 gRNAs targeting exons, shuffled exons, and introns in the human genome. Dashed lines indicate means. ***P<10-100. FIG. 19D, Pie chart depicting the output of Delphi for specific outcome classes. MH deletions (58% of all products) and single-base insertions (9% of all products) are predicted at single-base resolution, and deletion length is predicted for MH-less deletions (25% of all products). FIGS. 19E and 19F show a comparison of two methods for frameshift predictions to observed values with Pearson's r in HCT116 cells (FIG. 19E, n=91 target sites) and K562 cells (FIG. 19F, n=82 target sites). The error band represents the 95% confidence intervals around the regression estimate with 1,000-fold bootstrapping.

[0096] FIGS. 20A-20K show target sequences with extremely high or low microhomology phi scores skew toward a single predictable Cas9-mediated edited product. FIG. 20A, Scatter plot of the frequency of microduplication repair in Lib-B target sequences with designed 7-25-bp regions of microduplication as a function of microduplication length in human U2OS (N=32) and HEK293T cells (N=39). The Error band represents the 95% C.I. around the regression estimate with 1,000-fold bootstrapping. FIG. 20B, Box plots displaying total deletion phi score, total precision scores, and 1-bp insertion frequencies for (blue) 312 Lib-B sequences in the low-microhomology cohort with four randomized bases flanking the cutsite (fourbp), (green) 89 VO sequences (VO), and (red) 71 Lib-B sequences in the high-microhomology cohort with microduplications ranging from 7-25 bp (longdup). Box displays median and first and third quartiles. Whiskers are at 1.5 times interquartile range (IQR). Either swarm plot or outlier fliers depicted for each box plot. *P=6.1×10-9; two-sided two-sample T-test, test statistic=−5.94, degrees of freedom=399, Hedges' g effect size=0.49. FIG. 20C, Scatterplot of 1-bp insertion frequency among all non-wild-type products when varying four bases surrounding the cutsite (positions −5 to −2 counted from the NGG-PAM at positions 0-2) with all x-tick labels depicted, contained within three target sequences (red, blue, green) from the low-microhomology cohort of Lib-B in mESCs (N=205). FIG. 20D, Distribution of the total frequency of all non-wild-type Cas9 editing products in the subset of target sequences from the low-microhomology cohort containing four randomized bases flanking the cutsite (fourbp) with >50% overall frequencies of 1-bp insertion (N=50), VO sequences (N=89), and the high-microhomology cohort with microduplications ranging from 7-25 bp (longdup) in Lib-B editing in mESCs (N=56). FIG. 20E, Scatterplot displaying 1-bp insertion frequencies and Cas9 editing rate in 205 “fourbp” contexts with Pearson correlation of −0.35 (P=3.3e-07). FIG. 20F shows the frequency of 1-bp insertions in mESCs (n=1,981 lib-A target sites) and U2OS cells (n=1,918) with varying −4 nucleotides. FIGS. 20G and 20H show plots of 1-bp insertion frequency in mESCs (n=1,996 lib-A target sites) and U2OS cells (n=1,966) compared to their total phi score (FIG. 20G) and predicted deletion length precision score (FIG. 20H) with Pearson's r. FIG. 20I shows a comparison of 1-bp insertion frequencies among all edited products from 1,966 lib-A target sites in U2OS cells (combined data from n=2 independent biological replicates). FIG. 20J shows nucleotides and their effect on the frequency of 1-bp insertions in U2OS cells. Only bases with non-zero linear regression weights in 10,000-fold iterative cross-validation are shown. Total n=1,966 lib-A target sites. FIG. 20K shows the insertion frequency in mESCs (n=205) and U2OS cells (n=217) when varying four bases by the cleavage site (positions −5 to −2 counted from the NGG-PAM at positions 0-2) contained within three target sites designed with weak microhomology.

[0097] FIGS. 21A-21D show the precise repair of pathogenic microduplications. FIG. 21A, Observed frequencies of repair to wild-type genotype at 194 ClinVar pathogenic alleles vs. predicted frequencies in Lib-B in human HEK293T cells. FIG. 21B, Observed frequencies of repair to wild-type frame at 140 ClinVar pathogenic alleles vs. predicted frequencies in Lib-B in human HEK293T cells. FIG. 21C, Observed frequencies of repair to wild-type genotype at 49 Clinvar pathogenic alleles vs. predicted frequencies in Lib-B in human U2OS cells. FIG. 21D, Observed frequencies of repair to wild-type frame at 37 ClinVar pathogenic alleles vs. predicted frequencies in Lib-B in human U2OS cells.

[0098] FIGS. 22A-22E show altered distribution of Cas9-mediated genotypic products in Prkdc−/−Lig4−/− mESCs as compared to wild-type mESCs. FIG. 22A, Distribution of Cas9-mediated genotypic products by repair outcome class in Prkdc−/−Lig4−/− mESC for 1,446 target sequences. FIG. 22B, Comparison of observed mean frequency of deletion products contributed by microhomology-less unilateral joining and medial joining deletions among all deletions comparing 1,995 Lib-A target sequences in wildtype mESC to 1,850 Lib-A target sequences in Prkdc−/−Lig4−/− mESC. *P<10-66; two-sided two-sample T-test, test statistic >17.7, degrees of freedom=3,843; Hedges' g effect size >0.58. FIG. 22C, Comparison of observed frequency of deletion products contributed by microhomology-less unilateral joining and medial joining deletions among all deletions, between 1,995 Lib-A target sequences in wildtype mESC to 1,850 Lib-A target sequences in Prkdc−/−Lig4−/− mESC. * and ** as in (FIG. 22B). The box denotes the 25th, 50th and 75th percentiles, whiskers show 1.5 times the interquartile range, and outliers are depicted as fliers. FIG. 22D, Observed mean frequency of 1-bp insertion genotypes at 1,055 target sequences with varying −4 nucleotides in Lib-A in Prkdc−/−Lig4−/− mESCs. The error bars show the 95% C.I. on the sample mean with 1,000-fold bootstrapping. FIG. 22E, Observed frequency of 1-bp insertion genotypes at 1,055 target sequences with varying −4 nucleotides in Lib-A in Prkdc−/−Lig4−/− mESCs. Box plot as in

(b).

[0099] FIGS. 23A-23H show that template-free Cas9-nuclease editing of human cells containing pathogenic LDLR microduplication alleles restores LDL uptake. FIG. 23A, Flow cytometric contour plots showing GFP fluorescence and LDL-Dylight550 uptake in HCT116 cells containing the denoted LDLR alleles and treated with SaCas9 and gRNA when denoted. FIG. 23B, Fluorescence microscopy of HCT116 cells containing the denoted LDLR alleles and treated with SaCas9 and gRNA when denoted. GFP fluorescence is shown in green, LDL-Dylight550 uptake in red, and Hoechst staining nuclei in blue. FIG. 23C, Fluorescence microscopy of U2OS cells containing the denoted LDLR alleles and treated with SaCas9 and gRNA when denoted. GFP fluorescence is shown in green, LDL-Dylight550 uptake in red, and Hoechst staining nuclei in blue. FIG. 23D, Flow cytometry gating strategy used for mESC+LDLRdup-P2A-GFP untreated. FIG. 23E, Flow cytometry gating strategy used for mESC+LDLRdup-P2A-GFP+SpCas9+gRNA. FIGS. 23F and 23G show the results of 12 pathogenic 1-bp deletion alleles selected by inDelphi for high 1-bp insertion frequency (combined data from n=2 independent biological replicates) compared to lib-A (f) and presented in a table (FIG. 23G). The box denotes the 25th, 50th and 75th percentiles, whiskers show 1.5 times the interquartile range, and outliers are depicted as diamonds. *P=1.6×10-4, two-sided Welch's t-test. For detailed statistics, see Methods. In the table, the most frequent 1-bp insertion genotype predicted by inDelphi that does not correspond to the wild-type genotype is indicated by an asterisk. In fluorescence microscopy plots, GFP fluorescence is shown in green, LDL-Dylight550 uptake in red, and Hoechst staining nuclei in blue. FIG. 23H shows mESC-trained inDelphi genotype prediction accuracy as 40 library sites.

[0100] FIG. 24A is a schematic depicting an exemplary method of using a trained computational model (e.g., “inDelphi”) in conjunction with a Cas-based genome editing system to edit a nucleotide sequence (e.g., a genome) to achieve a desired genetic outcome (e.g., a correction to a disease-causing mutation to treat a disease, or modification of a wildtype type gene to confer an improved trait or phenotype). For any given set of inputs (a context sequence and a selected cut site), the trained computational model computes the probability distribution of indel lengths and the probability distribution of genotype frequencies, enabling the user to select the optimal input (e.g., cut site) for conducting editing by a Cas-based genome editing system to achieve the highest frequency of desired genetic output. The computational method may be used to predict, for a given local sequence context, template-free repair genotypes and frequencies of occurrence thereof.

[0101] FIG. 24B is a schematic depicting an exemplary method of using a trained computational model (e.g., “inDelphi”) in conjunction with a double-strand break (DSB)-inducing genome editing system to edit a nucleotide sequence (e.g., a genome) to achieve a desired genetic outcome (e.g., a correction to a disease-causing mutation to treat a disease, or modification of a wildtype type gene to confer an improved trait or phenotype). For any given set of inputs (a context sequence and a selected cut site), the trained computational model computes the probability distribution of indel lengths and the probability distribution of genotype frequencies, enabling the user to select the optimal input (e.g., cut site) for conducting editing by a DSB-inducing genome editing system to achieve the highest frequency of desired genetic output. The computational method may be used to predict, for a given local sequence context, template-free repair genotypes and frequencies of occurrence thereof.

[0102] FIG. 25A-25D provides a characterization of lib-B data including pathogenic microduplication repair in wild-type mESCs, wild-type U2OS cells and mESCs treated with DPKi3, NU7026 and MLN4924. FIG. 25A shows box plots of the number of unique high-confidence editing outcomes called by simulating data subsampling in data at 2,000 lib-B target sites in mESCs (combined data from n=2 independent technical replicates) and U2OS cells (combined data from n=2 independent biological replicates). In ‘all’, the full non-subsampled data are presented (see Table 8 herein for read counts). Each box depicts data for 2,000 target sites. The box denotes the 25th, 50th, and 75th percentiles and whiskers show 1.5 times the interquartile range. Outliers are not depicted. FIG. 25B shows the frequencies of repair to wild-type genotype at 567 ClinVar pathogenic alleles versus predicted frequencies in lib-B in human U2OS cells with Pearson's r. FIG. 25C shows the frequencies of repair to wild-type frame at 437 ClinVar pathogenic alleles versus predicted frequencies in lib-B in human U2OS cells with Pearson's r. FIG. 25D shows the frequency of pathogenic microduplication repair in wild-type mESCs (n=1,480 target sites) compared to mESCs treated with MLN4924 (n=1,569), NU7041 (n=1,561) and DPKi3 (n=1,563).

[0103] FIG. 26A-26G shows the altered distributions of Cas9-mediated genotypic products in Prkdc−/−Lig4−/− mESCs and mESCs treated with DPKi3, NU7026, and MLN4924 compared to wild-type mESCs. FIG. 26A shows a comparison of MH deletions among all deletions at lib-B target sites in wild-type cells (n=1,909 target sites), cells treated with DPKi3 (n=1,999), MLN4924 (n=1,995) or NU7026 (n=1,999) and Prkdc−/−Lig4−/− cells (n=1,446). Statistical tests performed against wild-type population. *P=5.6×10-5, **P=3.5×10-13, ***P=5.0×10-41, two-sided Welch's t-test. FIG. 26B shows a comparison of the frequency of each class of MH-less deletions among all deletion products in wild-type (lib-A and lib-B target sites, n=3,829 target sites), DPKi3 (lib-B, n=1,990), MLN4924 (lib-B, n=1,980), NU7026 (lib-B, n=1,992) and Prkdc−/−Lig4−/− (lib-A and lib-B target sites, n=3,344). P values are compared to wild-type, two-sided Welch's t-test. FIG. 26C shows frequency of 1-bp insertions at 1,055 target sites in lib-A in Prkdc−/−Lig4−/− mESCs. FIG. 26D Frequencies of deletion repair to wild-type genotype in lib-B in wild-type mESCs (n=1,480 target sites, combined data from two technical replicates) compared to conditions, with combined data from two independent biological replicates for each of Prkdc−/−Lig4−/− (n=1,041 target sites), MLN4924 (n=1,569), NU7026 (n=1,561) and DPKi3 (n=1,563). FIG. 26E provides a table of Pearson's r of the change in disease correction frequency compared to wild-type at n=791 target sites for each pair of conditions. f, g, Annexin V-568 staining flow cytometry contour plots (FIG. 26F) and mean±standard deviation values (FIG. 26G) in wild-type and Prkdc−/−Lig4−/−lib-A mESCs following transfection with SpCas9-P2A-GFP (representative data for n=2 experiments). Box plots denote the 25th, 50th and 75th percentiles, whiskers show 1.5 times the interquartile range, and outliers are depicted as diamonds.

### DEFINITIONS

[0104] As used herein and in the claims, the singular forms “a,” “an,” and “the” include the singular and the plural reference unless the context clearly indicates otherwise. Thus, for example, a reference to “an agent” includes a single agent and a plurality of such agents.

[0105] The term “Cas9” or “Cas9 nuclease” refers to an RNA-guided nuclease comprising a Cas9 protein, or a fragment thereof (e.g., a protein comprising an active or inactive DNA cleavage domain of Cas9, and/or the gRNA binding domain of Cas9). A Cas9 nuclease is also referred to sometimes as a casn1 nuclease or a CRISPR (clustered regularly interspaced short palindromic repeat)-associated nuclease. CRISPR is an adaptive immune system that provides protection against mobile genetic elements (viruses, transposable elements and conjugative plasmids). CRISPR clusters contain spacers, sequences complementary to antecedent mobile elements, and target invading nucleic acids. CRISPR clusters are transcribed and processed into CRISPR RNA (crRNA). In type II CRISPR systems correct processing of pre-crRNA requires a trans-encoded small RNA (tracrRNA), endogenous ribonuclease 3 (mc) and a Cas9 protein. The tracrRNA serves as a guide for ribonuclease 3-aided processing of pre-crRNA. Subsequently, Cas9/crRNA/tracrRNA endonucleolytically cleaves linear or circular dsDNA target complementary to the spacer. The target strand not complementary to crRNA is first cut endonucleolytically, then trimmed 3′-5′ exonucleolytically. In nature, DNA-binding and cleavage typically requires protein and both RNAs. However, single guide RNAs (“sgRNA”, or simply “gNRA”) can be engineered so as to incorporate aspects of both the crRNA and tracrRNA into a single RNA species. See, e.g., Jinek M., Chylinski K., Fonfara I., Hauer M., Doudna J. A., Charpentier E. Science 337:816-821(2012), the entire contents of which is hereby incorporated by reference. Cas9 recognizes a short motif in the CRISPR repeat sequences (the PAM or protospacer adjacent motif) to help distinguish self versus non-self. Cas9 nuclease sequences and structures are well known to those of skill in the art (see, e.g., “Complete genome sequence of an M1 strain of Streptococcus pyogenes.” Ferretti et al., J. J., McShan W. M., Ajdic D. J., Savic D. J., Savic G., Lyon K., Primeaux C., Sezate S., Suvorov A. N., Kenton S., Lai H. S., Lin S. P., Qian Y., Jia H. G., Najar F. Z., Ren Q., Zhu H., Song L., White J., Yuan X., Clifton S. W., Roe B. A., McLaughlin R. E., Proc. Natl. Acad. Sci. U.S.A. 98:4658-4663(2001); “CRISPR RNA maturation by trans-encoded small RNA and host factor RNase III.” Deltcheva E., Chylinski K., Sharma C. M., Gonzales K., Chao Y., Pirzada Z. A., Eckert M. R., Vogel J., Charpentier E., Nature 471:602-607(2011); and “A programmable dual-RNA-guided DNA endonuclease in adaptive bacterial immunity.” Jinek M., Chylinski K., Fonfara I., Hauer M., Doudna J. A., Charpentier E. Science 337:816-821(2012), the entire contents of each of which are incorporated herein by reference). Cas9 orthologs have been described in various species, including, but not limited to, S. pyogenes and S. thermophilus. Additional suitable Cas9 nucleases and sequences will be apparent to those of skill in the art based on this disclosure, and such Cas9 nucleases and sequences include Cas9 sequences from the organisms and loci disclosed in Chylinski, Rhun, and Charpentier, “The tracrRNA and Cas9 families of type II CRISPR-Cas immunity systems” (2013) RNA Biology 10:5, 726-737; the entire contents of which are incorporated herein by reference. In some embodiments, a Cas9 nuclease has an inactive (e.g., an inactivated) DNA cleavage domain.

[0106] In some embodiments, Cas9 refers to Cas9 from: Corynebacterium ulcerans (NCBI Refs: NC_015683.1, NC_017317.1); Corynebacterium diphtheria (NCBI Refs: NC_016782.1, NC_016786.1); Spiroplasma syrphidicola (NCBI Ref: NC_021284.1); Prevotella intermedia (NCBI Ref: NC_017861.1); Spiroplasma taiwanense (NCBI Ref: NC_021846.1); Streptococcus iniae (NCBI Ref: NC_021314.1); Belliella baltica (NCBI Ref: NC_018010.1); Psychroflexus torques I (NCBI Ref: NC_018721.1); Streptococcus thermophilus (NCBI Ref: YP_820832.1); Listeria innocua (NCBI Ref: NP_472073.1); Campylobacter jejuni (NCBI Ref: YP_002344900.1); or Neisseria meningitidis (NCBI Ref: YP_002342100.1).

[0107] The term “Cas-based genome editing system” refers to a system comprising any naturally occurring or variant Cas endonuclease (e.g., Cas9), or functional variant, homolog, or orthologue thereof, and a cognate guide RNA. The term “Cas-based genome editing system” may also refer to an expression vector having at least one expressible nucleotide sequence encoding a Cas protein (or homolog, variant, or orthologue thereof) and at least one other expressible nucleotide sequence encoding a guide RNA.

[0108] The term “DSB-based genome editing system” refers to a system comprising any naturally occurring or variant endonuclease which catalyzes the formation of a double strand break at a cut site (e.g., Cas9, Crf1, TALEN, or Zinc Finger), or functional variant, homolog, or orthologue thereof, and a cognate guide RNA if required (e.g., TALENs and Zinc Fingers do not require a guide RNA for targeting to a cut site). The term “DSB-based genome editing system” may also refer to an expression vector having at least one expressible nucleotide sequence encoding a DSB endonuclease protein (or homolog, variant, or orthologue thereof) and at least one other expressible nucleotide sequence encoding a guide RNA, if required (e.g., as required for Cas9 or Crf1).

[0109] The term “effective amount,” as used herein, refers to an amount of a biologically active agent that is sufficient to elicit a desired biological response. For example, in some embodiments, an effective amount of a nuclease may refer to the amount of the nuclease that is sufficient to induce cleavage of a target site specifically bound and cleaved by the nuclease. In some embodiments, an effective amount of a recombinase may refer to the amount of the recombinase that is sufficient to induce recombination at a target site specifically bound and recombined by the recombinase. As will be appreciated by the skilled artisan, the effective amount of an agent, e.g., a nuclease, a recombinase, a hybrid protein, a fusion protein, a protein dimer, a complex of a protein (or protein dimer) and a polynucleotide, or a polynucleotide, may vary depending on various factors as, for example, on the desired biological response, the specific allele, genome, target site, cell, or tissue being targeted, and the agent being used.

[0110] The term “linker,” as used herein, refers to a chemical group or a molecule linking two molecules or moieties, e.g., a binding domain and a cleavage domain of a nuclease. In some embodiments, a linker joins a gRNA binding domain of an RNA-programmable nuclease and the catalytic domain of a recombinase. In some embodiments, a linker joins a dCas9 and a recombinase. Typically, the linker is positioned between, or flanked by, two groups, molecules, or other moieties and connected to each one via a covalent bond, thus connecting the two. In some embodiments, the linker is an amino acid or a plurality of amino acids (e.g., a peptide or protein). In some embodiments, the linker is an organic molecule, group, polymer, or chemical moiety. In some embodiments, the linker is 5-100 amino acids in length, for example, 5, 6, 7, 8, 9, 10, 11, 12, 13, 14, 15, 16, 17, 18, 19, 20, 21, 22, 23, 24, 25, 26, 27, 28, 29, 30, 30-35, 35-40, 40-45, 45-50, 50-60, 60-70, 70-80, 80-90, 90-100, 100-150, or 150-200 amino acids in length. Longer or shorter linkers are also contemplated.

[0111] The term “mutation,” as used herein, refers to a substitution of a residue within a sequence, e.g., a nucleic acid or amino acid sequence, with another residue, or a deletion or insertion of one or more residues within a sequence. Mutations are typically described herein by identifying the original residue followed by the position of the residue within the sequence and by the identity of the newly substituted residue. Various methods for making the amino acid substitutions (mutations) provided herein are well known in the art, and are provided by, for example, Green and Sambrook, Molecular Cloning: A Laboratory Manual (4^{th} ed., Cold Spring Harbor Laboratory Press, Cold Spring Harbor, N.Y. (2012)). Mutations can include a variety of categories, such as single base polymorphisms, microduplication regions, indel, and inversions, and is not meant to be limiting in any way.

[0112] The terms “nucleic acid” and “nucleic acid molecule,” as used herein, refer to a compound comprising a nucleobase and an acidic moiety, e.g., a nucleoside, a nucleotide, or a polymer of nucleotides. Typically, polymeric nucleic acids, e.g., nucleic acid molecules comprising three or more nucleotides are linear molecules, in which adjacent nucleotides are linked to each other via a phosphodiester linkage. In some embodiments, “nucleic acid” refers to individual nucleic acid residues (e.g. nucleotides and/or nucleosides). In some embodiments, “nucleic acid” refers to an oligonucleotide chain comprising three or more individual nucleotide residues. As used herein, the terms “oligonucleotide” and “polynucleotide” can be used interchangeably to refer to a polymer of nucleotides (e.g., a string of at least three nucleotides). In some embodiments, “nucleic acid” encompasses RNA as well as single and/or double-stranded DNA. Nucleic acids may be naturally occurring, for example, in the context of a genome, a transcript, an mRNA, tRNA, rRNA, siRNA, snRNA, a plasmid, cosmid, chromosome, chromatid, or other naturally occurring nucleic acid molecule. On the other hand, a nucleic acid molecule may be a non-naturally occurring molecule, e.g., a recombinant DNA or RNA, an artificial chromosome, an engineered genome, or fragment thereof, or a synthetic DNA, RNA, DNA/RNA hybrid, or including non-naturally occurring nucleotides or nucleosides. Furthermore, the terms “nucleic acid,” “DNA,” “RNA,” and/or similar terms include nucleic acid analogs, e.g., analogs having other than a phosphodiester backbone. Nucleic acids can be purified from natural sources, produced using recombinant expression systems and optionally purified, chemically synthesized, etc. Where appropriate, e.g., in the case of chemically synthesized molecules, nucleic acids can comprise nucleoside analogs such as analogs having chemically modified bases or sugars, and backbone modifications. A nucleic acid sequence is presented in the 5′ to 3′ direction unless otherwise indicated. In some embodiments, a nucleic acid is or comprises natural nucleosides (e.g. adenosine, thymidine, guanosine, cytidine, uridine, deoxyadenosine, deoxythymidine, deoxyguanosine, and deoxycytidine); nucleoside analogs (e.g., 2-aminoadenosine, 2-thiothymidine, inosine, pyrrolo-pyrimidine, 3-methyl adenosine, 5-methylcytidine, 2-aminoadenosine, C5-bromouridine, C5-fluorouridine, C5-iodouridine, C5-propynyl-uridine, C5-propynyl-cytidine, C5-methylcytidine, 2-aminoadeno sine, 7-deazaadenosine, 7-deazaguanosine, 8-oxoadenosine, 8-oxoguanosine, 0(6)-methylguanine, and 2-thiocytidine); chemically modified bases; biologically modified bases (e.g., methylated bases); intercalated bases; modified sugars (e.g., 2′-fluororibose, ribose, 2′-deoxyribose, arabinose, and hexose); and/or modified phosphate groups (e.g., phosphorothioates and 5′-N-phosphoramidite linkages).

[0113] The terms “protein,” “peptide,” and “polypeptide” are used interchangeably herein, and refer to a polymer of amino acid residues linked together by peptide (amide) bonds. The terms refer to a protein, peptide, or polypeptide of any size, structure, or function. Typically, a protein, peptide, or polypeptide will be at least three amino acids long. A protein, peptide, or polypeptide may refer to an individual protein or a collection of proteins. One or more of the amino acids in a protein, peptide, or polypeptide may be modified, for example, by the addition of a chemical entity such as a carbohydrate group, a hydroxyl group, a phosphate group, a farnesyl group, an isofarnesyl group, a fatty acid group, a linker for conjugation, functionalization, or other modification, etc. A protein, peptide, or polypeptide may also be a single molecule or may be a multi-molecular complex. A protein, peptide, or polypeptide may be just a fragment of a naturally occurring protein or peptide. A protein, peptide, or polypeptide may be naturally occurring, recombinant, or synthetic, or any combination thereof. The term “fusion protein” as used herein refers to a hybrid polypeptide which comprises protein domains from at least two different proteins. One protein may be located at the amino-terminal (N-terminal) portion of the fusion protein or at the carboxy-terminal (C-terminal) protein thus forming an “amino-terminal fusion protein” or a “carboxy-terminal fusion protein,” respectively. A protein may comprise different domains, for example, a nucleic acid binding domain (e.g., the gRNA binding domain of Cas9 that directs the binding of the protein to a target site) and a nucleic acid cleavage domain or a catalytic domain of a recombinase. In some embodiments, a protein comprises a proteinaceous part, e.g., an amino acid sequence constituting a nucleic acid binding domain, and an organic compound, e.g., a compound that can act as a nucleic acid cleavage agent. In some embodiments, a protein is in a complex with, or is in association with, a nucleic acid, e.g., RNA. Any of the proteins provided herein may be produced by any method known in the art. For example, the proteins provided herein may be produced via recombinant protein expression and purification, which is especially suited for fusion proteins comprising a peptide linker. Methods for recombinant protein expression and purification are well known, and include those described by Green and Sambrook, Molecular Cloning: A Laboratory Manual (4th ed., Cold Spring Harbor Laboratory Press, Cold Spring Harbor, N.Y. (2012)), the entire contents of which are incorporated herein by reference.

[0114] The term “RNA-programmable nuclease,” and “RNA-guided nuclease” are used interchangeably herein and refer to a nuclease that forms a complex with (e.g., binds or associates with) one or more RNA that is not a target for cleavage. In some embodiments, an RNA-programmable nuclease, when in a complex with an RNA, may be referred to as a nuclease:RNA complex. Typically, the bound RNA(s) is referred to as a guide RNA (gRNA). gRNAs can exist as a complex of two or more RNAs, or as a single RNA molecule. gRNAs that exist as a single RNA molecule may be referred to as single-guide RNAs (sgRNAs), though “gRNA” is used interchangeabley to refer to guide RNAs that exist as either single molecules or as a complex of two or more molecules. Typically, gRNAs that exist as single RNA species comprise two domains: (1) a domain that shares homology to a target nucleic acid (e.g., and directs binding of a Cas9 complex to the target); and (2) a domain that binds a Cas9 protein. In some embodiments, domain (2) corresponds to a sequence known as a tracrRNA, and comprises a stem-loop structure. For example, in some embodiments, domain (2) is homologous to a tracrRNA as depicted in FIG. 1E of Jinek et al., Science 337:816-821(2012), the entire contents of which is incorporated herein by reference. Other examples of gRNAs (e.g., those including domain 2) can be found in U.S. Provisional Patent application, U.S. Ser. No. 61/874,682, filed Sep. 6, 2013, entitled “Switchable Cas9 Nucleases And Uses Thereof,” and U.S. Provisional Patent application, U.S. Ser. No. 61/874,746, filed Sep. 6, 2013, entitled “Delivery System For Functional Nucleases,” the entire contents of each are hereby incorporated by reference in their entirety. In some embodiments, a gRNA comprises two or more of domains (1) and (2), and may be referred to as an “extended gRNA.” For example, an extended gRNA will, e.g., bind two or more Cas9 proteins and bind a target nucleic acid at two or more distinct regions, as described herein. The gRNA comprises a nucleotide sequence that complements a target site, which mediates binding of the nuclease/RNA complex to said target site, providing the sequence specificity of the nuclease:RNA complex. In some embodiments, the RNA-programmable nuclease is the (CRISPR-associated system) Cas9 endonuclease, for example Cas9 (Csn1) from Streptococcus pyogenes (see, e.g., “Complete genome sequence of an M1 strain of Streptococcus pyogenes.” Ferretti J. J., McShan W. M., Ajdic D. J., Savic D. J., Savic G., Lyon K., Primeaux C., Sezate S., Suvorov A. N., Kenton S., Lai H. S., Lin S. P., Qian Y., Jia H. G., Najar F. Z., Ren Q., Zhu H., Song L., White J., Yuan X., Clifton S. W., Roe B. A., McLaughlin R. E., Proc. Natl. Acad. Sci. U.S.A. 98:4658-4663(2001); “CRISPR RNA maturation by trans-encoded small RNA and host factor RNase III.” Deltcheva E., Chylinski K., Sharma C. M., Gonzales K., Chao Y., Pirzada Z. A., Eckert M. R., Vogel J., Charpentier E., Nature 471:602-607(2011); and “A programmable dual-RNA-guided DNA endonuclease in adaptive bacterial immunity.” Jinek M., Chylinski K., Fonfara I., Hauer M., Doudna J. A., Charpentier E. Science 337:816-821(2012), the entire contents of each of which are incorporated herein by reference.

[0115] Because RNA-programmable nucleases (e.g., Cas9) use RNA:DNA hybridization to target DNA cleavage sites, these proteins are able to be targeted, in principle, to any sequence specified by the guide RNA. Methods of using RNA-programmable nucleases, such as Cas9, for site-specific cleavage (e.g., to modify a genome) are known in the art (see e.g., Cong, L. et al. Multiplex genome engineering using CRISPR/Cas systems. Science 339, 819-823 (2013); Mali, P. et al. RNA-guided human genome engineering via Cas9. Science 339, 823-826 (2013); Hwang, W. Y. et al. Efficient genome editing in zebrafish using a CRISPR-Cas system. Nature biotechnology 31, 227-229 (2013); Jinek, M. et al. RNA-programmed genome editing in human cells. eLife 2, e00471 (2013); Dicarlo, J. E. et al. Genome engineering in Saccharomyces cerevisiae using CRISPR-Cas systems. Nucleic acids research (2013); Jiang, W. et al. RNA-guided editing of bacterial genomes using CRISPR-Cas systems. Nature biotechnology 31, 233-239 (2013); the entire contents of each of which are incorporated herein by reference).

[0116] The term “subject,” as used herein, refers to an individual organism, for example, an individual mammal. In some embodiments, the subject is a human. In some embodiments, the subject is a non-human mammal. In some embodiments, the subject is a non-human primate. In some embodiments, the subject is a rodent. In some embodiments, the subject is a sheep, a goat, a cattle, a cat, or a dog. In some embodiments, the subject is a vertebrate, an amphibian, a reptile, a fish, an insect, a fly, or a nematode. In some embodiments, the subject is a research animal. In some embodiments, the subject is genetically engineered, e.g., a genetically engineered non-human subject. The subject may be of either sex and at any stage of development.

[0117] The terms “treatment,” “treat,” and “treating,” refer to a clinical intervention aimed to reverse, alleviate, delay the onset of, or inhibit the progress of a disease or disorder, or one or more symptoms thereof, as described herein. As used herein, the terms “treatment,” “treat,” and “treating” refer to a clinical intervention aimed to reverse, alleviate, delay the onset of, or inhibit the progress of a disease or disorder, or one or more symptoms thereof, as described herein. In some embodiments, treatment may be administered after one or more symptoms have developed and/or after a disease has been diagnosed. In other embodiments, treatment may be administered in the absence of symptoms, e.g., to prevent or delay onset of a symptom or inhibit onset or progression of a disease. For example, treatment may be administered to a susceptible individual prior to the onset of symptoms (e.g., in light of a history of symptoms and/or in light of genetic or other susceptibility factors). Treatment may also be continued after symptoms have resolved, for example, to prevent or delay their recurrence.

[0118] Use of ordinal terms such as “first,” “second,” “third,” etc. in the claims to modify a claim element does not by itself connote any priority, precedence, or order of one claim element over another or the temporal order in which acts of a method are performed, but are used merely as labels to distinguish one claim element having a certain name from another element having a same name (but for use of the ordinal term) to distinguish the claim elements.

[0119] Also, the phraseology and terminology used herein is for the purpose of description and should not be regarded as limiting. The use of “including,” “comprising,” “having,” “containing,” “involving,” and variations thereof herein, is meant to encompass the items listed thereafter and equivalents thereof as well as additional items.

### Detailed Description of Certain Embodiments

[0120] Major research efforts focus on improving efficiency and specificity of genome editing systems, such as, CRISPR/Cas9, other Cas-based, TALEN-based, and Zinc Finger-based genome editing systems. For instance, with regard to CRISPR/Cas9 systems, efficiency may be improved by predicting optimal Cas9 guide RNA (gRNA) sequences, while specificity may be improved by modeling factors leading to off-target cutting, and by manipulating Cas9 enzymes. Variant Cas9 enzymes and fusion proteins may be developed to alter the protospacer adjacent motif (PAM) sequences acted on by Cas9, and to produce base-editing Cas9 constructs with high efficiency and specificity. For example, Cpf1 (also known as Cas12a) and other alternatives may be used in CRISPR genome editing in addition to, or instead of, Cas9.

[0121] The inventors have recognized and appreciated that less attention has been devoted to understanding and modulating repair outcomes. In that respect, nucleotide insertions and/or deletions resulting from template-free repair mechanisms (e.g., NHEJ, MMEJ, etc. and excluding homology-based repair (HDR)) are commonly thought to be random and therefore only suitable for gene knock-out applications. For gene knock-in or gain-of-function applications, a template-based repair mechanism such as HDR is typically used.

[0122] CRISPR/Cas with HDR allows arbitrarily designed DNA sequences to be incorporated at precise genomic locations. However, this technique suffers from low efficiency—HDR occurs rarely in typical biological conditions (e.g., around 10% frequency), because cells only permit HDR to occur after sister chromatids are synthesized in S phase but before M phase when mitosis splits the sister chromatids into daughter cells. For many cell-types, the fraction of time spent in S-G2-M phases of a cell cycle is low. In sum, while outcomes are predictable when HDR does occur, HDR occurs infrequently, and therefore a desired DNA sequence will be incorporated into only a small percentage of cells. In addition, in post-mitotic cell-types of interest such as neurons, the HDR repair pathway is no longer used, further limiting HDR's utility for genetic engineering.

[0123] Some research has been done to improve efficiency of HDR, for example, through improved homology templates and small molecule modulation. Despite these efforts, template-based repair efficiency remains low, and proposed CRISPR/Cas gene knock-in or gain of function applications have thus far been limited to ex vivo applications where screening may be performed for cells with a desired repair genotype.

[0124] Unlike HDR, NHEJ is capable of occurring during any phase of a cell cycle and in post-mitotic cells. However, NHEJ, as discussed above, has been perceived as a random process that produces a large variety of repair genotypes with insertions and/or deletions, and has been used mainly to knock out genes. In short, NHEJ is efficient but unpredictable.

[0125] Recent work suggests that outcomes of some template-free repair mechanisms are actually non-random. For instance, it has been observed that MMEJ is involved in repair outcomes. Furthermore, repair outcomes have been analyzed to predict gRNAs that are more likely to produce frameshifts. However, there is still a need for accurate prediction of genotypic outcomes of CRISPR/Cas cutting and ensuing cellular DNA repair.

[0126] The present inventors have unexpectedly found through computational analyses that template-free DNA/genome editing systems, e.g., CRISPR/Cas9, Cas-based, Cpf1-based, or other DSB (double-strand break)-based genome editing systems, produce a predictable set of repair genotypes thereby enabling the use of such editing systems for applications involving or requiring precise manipulation of DNA, e.g., the correction of a disease-causing genetic mutation or modifying a wildtype sequence to confer a genetic advantage. This finding is contrary to the accepted view that DNA double-strand break repair (i.e., template-free, non-homology-dependent repair) following cleavage by genome editing systems produces stochastic and heterogenous repair products and are therefore impractical for applications beyond gene disruption. Thus, the specification describes and discloses in various aspects and embodiments computational-based methods and systems for practically harnessing the innate efficiencies of template-free DNA repair systems for carrying out precise DNA and/or genomic editing without the reliance upon homology-based repair.

[0127] In accordance with some embodiments, techniques are provided for predicting genotypes of CRISPR/Cas editing outcomes. For instance, a high-throughput approach may be used for monitoring CRISPR/Cas cutting outcomes, and/or a computer-implemented method may be used to predict genotypic repair outcomes for NHEJ and/or MMEJ. The inventors have recognized and appreciated that accurate prediction of repair genotypes may allow development of CRISPR/Cas gene knock-in or gain-of-function applications based on one or more template-free repair mechanisms. This approach may simplify a genome editing process, by reducing or eliminating a need to introduce exogenous DNA into a cell as a template.

[0128] Additionally, or alternatively, using one or more template-free repair mechanisms for gene knock-in may provide improved efficiency. For instance, the inventors have recognized and appreciated that NHEJ and MMEJ may account for a large portion of CRISPR/Cas repair products. While template-free repair mechanisms may not always produce desired repair genotypes with sufficiently high frequencies, one or more desired repair genotypes may occur with sufficiently high frequencies in some specific local sequence contexts. For such a local sequence context, template-free repair mechanisms may outperform HDR with respect to simplicity and efficiency.

[0129] In some embodiments, one or more of the techniques provided herein may be used to predict, for a given local sequence context, template-free repair genotypes and frequencies of occurrence thereof, which may facilitate designs of gene knock-in or gain-of-function applications. For example, the inventors have recognized and appreciated that some disease-causing alleles, when cut at a selected location by CRISPR/Cas, may exhibit one or just a few repair outcomes that occur at a high frequency and transform the disease-causing allele into one or more healthy alleles. Disease-causing alleles may occur in genomic sequences that code for proteins or regulatory RNAs, or genomic sequences that regulate transcription or other genomic functions.

[0130] In some embodiments, one or more of the techniques provided herein may be used to predict, for a given local sequence context, template-free repair genotypes and frequencies of occurrence thereof, which may be used to select desirable one or more guide RNAs when HDR is employed to edit DNA. Since HDR does not occur 100% of the time, the template-free repair genotypes predicted by this method will be a natural byproduct of sites where HDR failed to occur. The one or more techniques provided herein allow these failed HDR byproducts to be predicted and one or more guide RNAs chosen that will produce the most desirable byproducts for HDR failures. For example, a disease-causing allele may be targeted for HDR repair, but if HDR does not occur at a specific site the template-free repair products can be chosen to transform a disease-causing allele into one or more healthy alleles or to not have deleterious effects. Deleterious effects could result from template-free repair that changed a weakly functional allele into a non-functional allele or into a dominant allele that negatively impacted health. In some embodiments, guide RNA selection consists of considering all guide RNAs that are compatible with HDR repair of a disease-causing allele, and for each guide RNA using one or more of the techniques provided herein to predict its template-free repair genotypes. One or more guide RNAs are then selected for use with the HDR template that have the template-free repair genotypes that are most advantageous for health. Alternatively in some embodiments, one or more guide RNAs are then selected for use with the HDR template that have the template-free repair genotypes that are most likely to disrupt gene function.

[0131] It should be appreciated that the techniques disclosed herein may be implemented in any of numerous ways, as the disclosed techniques are not limited to any particular manner of implementation. Examples of details of implementation are provided solely for illustrative purposes. For instance, while examples are given where CRISPR/Cas9 is used to perform genome editing, it should be appreciated that aspects of the present application are not so limited. In some embodiments, another genome editing technique, such as CRISPR/Cpf1, may be used. Furthermore, the disclosed techniques may be used individually or in any suitable combination, as aspects of the present disclosure are not limited to the use of any particular technique or combination of techniques.

[0132] FIG. 1 shows an illustrative DNA segment 100, in accordance with some embodiments. For instance, the DNA segment 100 may be exon 43 of a dystrophin gene. About 4% of Duchenne's muscular dystrophy cases are caused by mutations in this exon. Therapeutic solutions showing success in clinical trials use antisense oligonucleotides to cause this exon to be skipped during translation, thereby restoring normal dystrophin function.

[0133] The inventors have recognized and appreciated that another therapeutic approach may be possible, using genome editing to make permanent changes to dystrophin exon 43. For instance, in some embodiments, CRISPR/Cas9 (or another suitable technique for cutting a DNA sequence, such as CRISPR/Cpf1) may be used to disrupt a donor splice site motif of dystrophin exon 43, and one or more template-free repair mechanisms may restore normal dystrophin function.

[0134] In one aspect, the specification discloses a computational model.

[0135] In certain embodiments, the computational model can predict and/or compute an optimized or preferred cut site for a DSB-based genome editing system for introducing a genetic change into a nucleotide sequence. In preferred embodiments, the repair does not require homology-based repair mechanisms.

[0136] In certain other embodiments, the computational model can predict and/or compute an optimized or preferred cut site for a Cas-based genome editing system for introducing a genetic change into a nucleotide sequence. In preferred embodiments, the repair does not require homology-based repair mechanisms.

[0137] In still other embodiments, the computation model provides for the selection of a optimized or preferred guide RNA for use with a Cas-based genome editing system for introducing a genetic change in a genome. In preferred embodiments, the repair does not require homology-based repair mechanisms.

[0138] In various embodiments, the computational model is a neural network model having one or more hidden layers.

[0139] In other embodiments, the computational model is a deep learning computational model.

[0140] In various embodiments, that the DSB-based genome editing system (e.g., a Cas-based genome editing system) edits the genome without relying on homology-based repair.

[0141] In various embodiments, that computational model is trained with experimental data to predict the probability of distribution of indel lengths for any given nucleotide sequence and cut site. In other embodiments, computational model is trained with experimental data to predict the probability of distribution of genotype frequencies for any given nucleotide sequence and cut site.

[0142] In embodiments, the computational model comprises one or more training modules for evaluating experimental data.

[0143] In an embodiment, the computational model comprises: a first training module (305) for computing a microhomology score matrix (305); a second training module (310) for computing a microhomology independent score matrix; and a third training module (315) for computing a probability distribution over 1-bp insertions, wherein once trained with experimental data the computational model computes a probability distribution over indel genotypes and a probability distribution over indel lengths for any given input nucleotide sequence and cut site.

[0144] In certain embodiments, the computational model predicts genomic repair outcomes for any given input nucleotide sequence (i.e., context sequence) and cut site.

[0145] In certain embodiments, the genomic repair outcomes comprise microhomology deletions, microhomology-less deletions, and 1-bp insertions.

[0146] In various embodiments, the one or more modules each comprising one more input features selected from the group consisting of: a target site nucleotide sequence; a cut site; a PAM-sequence; microhomology lengths relative at a cut site, % GC content at a cut site; and microhomology deletion lengths at a cut site.

[0147] In certain embodiments, the nucleotide sequence analyzed by the computational model is between about 25-100 nucleotides, 50-200 nucleotides, 100-400 nucleotides, 200-800 nucleotides, 400-1600 nucleotides, 800-3200 nucleotides, and 1600-6400 nucleotide, or more.

[0148] In various embodiments, the computation model concerns predicting genetic repair outcomes at double-strand breaks cleaves induced by any DSB-based genomic editing system (e.g., CRISPR/Cas9, Cas-base, Cfr1-based, or others). FIG. 1 depicts the anatomy of a double strand break. In the example shown in FIG. 1, the DNA segment 100 includes a top strand 105A and a bottom strand 105B. These two strands are complementary and therefore encode the same information. In some embodiments, CRISPR/Cas9 may be used to create a double strand cut at a selected donor splice site motif, which may be a specific sequence of 6-10 nucleotides. In the example of FIG. 1, an NGG PAM may be used, as underlined and shown at 115, so that a cut site 110 would occur within the selected donor splice site motif. Any suitable algorithm may be used to detect presence or absence of the splice site motif in repair products, thereby verifying if the splice site motif has been successfully eliminated.

[0149] FIGS. 2A-D show an illustrative matching of 3′ ends of top and bottom strands of a DNA segment at a cut site and an illustrative repair product, in accordance with some embodiments. For instance, the strands may be the illustrative top strand 105A and the illustrative bottom strand 105B of FIG. 1, and the cut site may be the illustrative cut site 110 of FIG. 1. (To avoid clutter, the surrounding sequence context is omitted in FIGS. 2B-D.)

[0150] In some embodiments, a segment of double-stranded DNA may be represented such that the top strand runs 5′ on the left to 3′ on the right. Given a cut in this double stranded DNA, nucleotides and their complementary base-paired nucleotides that lie between the 5′ end of the top strand and the cut site may be said to be located at the 5′ side of the cut site. Likewise, nucleotides and their complementary base-paired nucleotides that lie between the cut site and the 3′ end of the top strand may be said to be located at the 3′ side of the cut site.

[0151] In the example shown in FIG. 2A, a deletion length of 5 base pairs is considered, for example, as a result of 5′ end resection, where the top strand 105A has an overhang 200A of length 5 at the 5′ side of the cut site 110, and the bottom strand 105B has an overhang 200B of length 5 at the 3′ side of the cut site 110. As shown in FIG. 2B, there is no match between the overhangs 200A and 200B in the first three bases, but there is a match in each of the last two bases. Thus, in this example, a microhomology 205 is present, with a 2 base pair match.

[0152] FIG. 2C shows an illustrative result of flap removal, where the three mismatched bases in the overhang 200B are removed. For instance, in some embodiments, given a microhomology, some or all nucleotides on the 3′ side of the microhomology on the top strand, and/or some or all nucleotides on the 3′ side of the microhomology on the bottom strand, may be resected. Pictorially, with the top strand running 5′ to 3′, nucleotides to the right of the microhomology on the top strand may be resected, and nucleotides to the left of the microhomology on the bottom strand may be resected.

[0153] FIG. 2D shows an illustrative repair product resulting from polymerase fill-in and ligation, where three matching bases are added to the overhang 200B.

[0154] FIG. 3A shows an illustrative machine learning model 300, in accordance with some embodiments. The machine learning model 300 may be trained using experimental data to compute, given an input DNA sequence seq and a cut site location, a probability distribution over any suitable set of deletion and/or insertion genotypes, and/or a probability distribution over any suitable set of deletion and/or insertion lengths. For instance, in some embodiments, 1 base pair insertions and 1-60 base pair deletions may be considered. (These repair outcomes may also be referred to herein as +1 to −60 indels.) The inventors have observed empirically that indels outside of this range occur infrequently. However, it should be appreciated that aspects of the present disclosure are not limited to any particular set of repair outcomes. In some embodiments, only insertions (e.g., 1-2 base pair insertions), or only deletions (e.g., 1-28 base pair deletions), may be considered, for example, based on availability of training data.

[0155] The inventors have recognized and appreciated that accurate predictions of repair outcomes may be facilitated by separating the repair outcomes into three classes: microhomology (MH) deletions, microhomology-less (MH-less) deletions, and insertions. The inventors have further recognized and appreciated that different machine learning techniques may be applied to the different classes of repair outcomes. For instance, in the example of FIG. 3, the machine learning model 300 includes three modules: the MH deletion module 305, the MH-less deletion module 310, and the insertion module 315. As discussed below, these modules may compute scores for various indel genotypes and/or indel lengths, which may in turn be used to compute a probability distribution over indel genotypes and/or a probability distribution over indel lengths. In some embodiments, one or more modules (e.g., the MH deletion module 305 and the MH-less deletion module 310) may be trained jointly. In some embodiments, a module may be dependent upon one or more other modules. For instance, as discussed below, an input feature used in the insertion module 315 may be derived based on outputs of the MH deletion module 305 and/or the MH-less deletion module 310.

[0156] In some embodiments, MH deletions may include deletions that are derivable analytically by simulating MMEJ. For instance, all microhomologies may be identified for deletion lengths of interest (e.g., deletion lengths 1-60). A genotypic outcome may be derived for each such microhomology by simulating polymerase fill-in, for example, as discussed in connection with FIGS. 2A-2D. (The inventors have recognized and appreciated that there is a one-to-one correspondence between the microhomologies and the genotypic outcomes.) A deletion that is derivable in this manner may be classified as a MH deletion, whereas a deletion that is not derivable in this matter may be classified as a MH-less deletion.

[0157] Techniques for identifying microhomologies for a given a deletion length L of interest (e.g., each deletion length between 1 and 60) are described below. However, it should be appreciated that aspects of the present disclosure are not limited to the use of any particular technique for identifying microhomologies.

[0158] In some embodiments, an input DNA sequence seq may be represented as a vector with integer indices, where each element of the vector is a nucleotide from the set, {A, C, G, T}, and the cut site is between seq[−1] and seq[0], and seq is oriented 5′ on the left to 3′ on the right. A subsequence seq[i:j], i<j, may be a vector of length j−i, including elements seq[i] to seq[j−1]. For each deletion length L of interest (e.g., L between 1 and 60), left[L] may be used to denote seq[−L: 0], and right[L] may be used to denote seq[0, L]. Thus, with reference to the example shown in FIGS. 1, 2A, left[5] may be ACAAG, and right[5] may be GGTAG. Because the top strand 105A and the bottom strand 105B are complementary, a microhomology (e.g., the microhomology 205) may be identified by looking for exact matches between left[5] and right[5] (which may be equivalent to complementary matches between the overhang 200A and the overhang 200B). For instance, a match vector may be constructed for each deletion length L of interest (e.g., L between 1 and 60) as follows: match[L][i]=T if left[L][i]=right[L][i], otherwise match[L][i]=‘.’ Such matching between left[5] and right[5] is illustrated below.

ACAAG
...||
GGTAG

[0159] In some embodiments, a microhomology may be identified by looking for match[L][i:j] such that match[L][k]=T for all i<k<j and match[L][i] !=T and match[L][j] !=‘|’. For instance, with reference to the example shown in FIG. 1, there may be no microhomology for deletion length 3, no microhomology for deletion length 4, one microhomology for deletion length 5, three microhomologies for deletion length 6, etc., as illustrated below.

AAG
...
GGT
...
CAAG
....
GGTA
....
ACAAG
...||
GGTAG
GACAAG
|..|.|
GGTAGG

[0160] In some embodiments, microhomologies identified for a suitable set of deletion lengths (e.g., 1-60) may be enumerated using indices n=1 . . . N, where N is the number of identified microhomologies. For each n, let G [n] denote the genotypic outcome corresponding to the microhomology n, let ML [n] denote the microhomology length of the microhomology n, let C [n] denote the GC fraction of the microhomology n, and let DL [n] denote the deletion length of the microhomology n.

[0161] Although examples of representations of DNA sequences and subsequences are discussed herein, it should be appreciated that aspects of the present disclosure are not limited to the use of any particular representation.

[0162] FIG. 3B shows an illustrative process 350 for building one or more machine learning models for predicting frequencies of deletion genotypes and/or deletion lengths, in accordance with some embodiments. For instance, the process 350 may be used to build the illustrative MH deletion module 305 and/or the illustrative MH-less deletion module 310 in the example of FIG. 3A. These modules may be used to compute, given an input DNA sequence seq and a cut site location, a probability distribution over any suitable set of deletion genotypes and/or a probability distribution over any suitable set of deletion lengths.

[0163] In some embodiments, a probability distribution over deletion lengths from 1-60 may be computed. However, it should be appreciated that aspects of the present disclosure are not limited to any particular set of deletion lengths. In some embodiments, an upper limit of deletion lengths may be determined based on availability of training data and/or any other one or more suitable considerations.

[0164] Referring to FIG. 3B, act 355 of the process 350 may include, for each deletion length L of interest (e.g., each deletion length between 1-60), aligning subsequences of length L on the 5′ and 3′ sides of a cut site in an input DNA sequence to identify one or more microhomologies, as discussed in connection with FIG. 3A. This may be performed for an input DNA sequence and a cut site for which repair genotype data from an CRISPR/Cas9 experiment is available.

[0165] At act 360, one or more microhomologies identified at act 355 may be featurized. Any suitable one or more features may be used, as aspects of the present disclosure are not so limited. As one example, the inventors have recognized and appreciated that energetic stability of a microhomology may increase proportionately with a length of the microhomology. Accordingly, in some embodiments, a microhomology length j−i may be used as a feature for a microhomology match[L][i:j].

[0166] As another example, the inventors have recognized and appreciated that thermodynamic stability of a microhomology may depend on specific base pairings, and that G-C pairings have three hydrogen bonds and therefore have higher thermodynamic stability than A-T pairings, which have two hydrogen bonds. Accordingly, in some embodiments, a GC fraction, as shown below, may be used as a feature for a microhomology match[L][i:j], where indicator(boolean) equals 1 if Boolean is true, and 0 otherwise.

$$\frac{{\sum }_{k = i}^{j - 1} indicator ( top [ L ] [ k ] = ‘ G ’ or ‘ C ’ )}{j - i}$$

[0167] In some embodiments, a length N vector may be constructed for each feature (e.g., microhomology length, GC fraction, etc.), where N is the number of microhomologies identified at act 355 for a set of deletion lengths of interest (e.g., 1-60), as discussed in connection with FIG. 3A. As discussed above, the inventors have recognized and appreciated that there is a one-to-one correspondence between microhomologies and genotypic outcomes that are classified as MH deletions. Therefore, feature vectors for microhomologies may be viewed as feature vectors for MH deletions.

[0168] In some embodiments, acts 355 and 360 may be repeated for different input DNA sequences and/or cut sites for which repair genotype data from CRISPR/Cas9 experiments is available.

[0169] It should be appreciated that aspects of the present disclosure are not limited to any particular featurization technique. For instance, in some embodiments, two features may be used, such as microhomology length and GC fraction. However, that is not required, as in some embodiments one feature may be used (e.g., microhomology length, GC fraction, or some other suitable feature), or more than two features may be used (e.g., three, four, five, etc.). Examples of features that may be used for a microhomology match[L][i:j] within a deletion of length L include, but are not limited to, a position of the microhomology within the deletion (e.g., as represented by

$$\frac{{\sum }_{k = i}^{j - 1} k}{L * ( j - i )} ) ,$$

and a ratio between a length of the microhomology (i.e., j−i) and the deletion length L. As another example, the inventors have recognized and appreciated that deoxyribonuclease (DNase) hypersensitivity may be used to classify genomic sequences into open or closed chromatin, which may impact DNA repair outcomes. Accordingly, in some embodiments, open vs. closed chromatin may be used as a feature. Any one or more of these features, and/or other features, may be used in addition to, or instead of, microhomology length and GC fraction. Furthermore, in some embodiments, explicit featurization may be reduced or eliminated by automatically learning data representations (e.g., using one or more deep learning techniques). Returning to FIG. 3B, one or more machine learning models may be trained at act 365 to compute one or more target probability distributions. For instance, a neural network model may be built for the illustrative MH deletion module 305 in the example of FIG. 3A. This model may take as input a length N vector for each of one or more features, as constructed at act 360, and output a length N vector of MH scores, where N is the number of microhomologies identified at act 355 for a set of deletion lengths of interest (e.g., 1-60). Additionally, or alternatively, a neural network model may be built for the illustrative MH-less deletion module 310 in the example of FIG. 3A. This model may take as input a vector for each of one or more features, and output a vector of MH-less scores. Both of the input vector and the output vector may be indexed by the set of deletion lengths of interest (e.g., 1-60) These neural network models may then be trained jointly using repair genotype data collected from CRISPR/Cas9 experiments.

[0170] FIG. 4A shows an illustrative neural network 400A for computing MH scores, in accordance with some embodiments. For instance, the neural network 400A may be used in the illustrative MH deletion module 305 in the example of FIG. 3A, and may be trained at act 365 of the illustrative process 350 shown in FIG. 3B.

[0171] In some embodiments, the neural network 400A may have one input node for each microhomology feature being used. For instance, in the example shown in FIG. 4A, there are two input nodes, which are associated with microhomology length and GC fraction, respectively. Each input node may receive a length N vector, where N is the number of microhomologies identified for a set of deletion lengths of interest (e.g., 1-60), for example, as discussed in connection with act 355 in the example of FIG. 3B.

[0172] In some embodiments, the neural network 400A may include one or more hidden layers, each having one or more nodes. In the example shown in FIG. 4A, there are two hidden layers, each having 16 nodes. However, it should be appreciated that aspects of the present disclosure are not limited to the use of any particular number of hidden layers or any particular number of nodes in a hidden layer. Furthermore, different hidden layers may have different numbers of nodes.

[0173] In some embodiments, the neural network 400A may be fully connected. (To avoid clutter, the connections are not illustrated in FIG. 4A.) However, that is not required. For instance, in some embodiments, a dropout technique may be used, where a parameter p may be selected, and during training each node's value is independently set to 0 with probability p. This may result in a neural network that is not fully connected.

[0174] In some embodiments, a leaky rectified linear unit (ReLU) nonlinearity sigma may be used in the neural network 400A. For instance, at hidden layer h and node i, an activation function may be provided as follows:

unit[h][i]=sigma(w[h][i]*unit[h−1]+b[h][i]),

where sigma(x)=max(0, x)+0.001*min(0, x).

[0175] Thus, the neural network 400A may be parameterized by w[h] and b[h] for each hidden layer h. In some embodiments, these parameters may be initialized randomly, for example, from a spherical Gaussian distribution with some suitable center (e.g., 0) and some suitable variance (e.g., 0.1). These parameters may then be trained using repair genotype data collected from CRISPR/Cas9 experiments, for instance, as discussed below.

[0176] In some embodiments, the neural network 400A may have one output node, producing a length N vector ψ_{MH} of scores, where N is the number of microhomologies identified for the set of deletion lengths of interest (e.g., 1-60). Thus, there may be one score for each identified microhomology.

[0177] In some embodiments, the neural network 400A may operate independently for each microhomology, taking as input the length of that microhomology (from the first input node) and the GC fraction of that microhomology (from the second input node), transforming those two values into 16 values (at the first hidden layer), then transforming those 16 values into 16 other values (at the second hidden layer), and finally outputting a single value (at the output node). In such an embodiment, parameters for the first hidden layer, w[1][i] and b[1][i], are vectors of length 2 for each node i from 1 to 16, whereas parameters for the second hidden layer, w[2][i] and b[2][i], are vectors of length 16 for each node i from 1 to 16, and parameters for the output layer, w[3][1] and b[3][1], are also vectors of length 16.

[0178] In some embodiments, the vector ψ_{MH} of raw scores may be converted into a vector ϕ_{MH} of MH scores. The inventors have recognized and appreciated (e.g., from experimental data) that the strength of a microhomology decreases exponentially with deletion length. Accordingly, in some embodiments, an exponential linear model may be used to convert the raw scores into the MH scores. For instance, the following formula may be used:

ϕ_{MH}[n]=exp(ψ_{MH}[n]−DL[n]*0.25),

where n is an index for a microhomology (and thus a number between 1 and N), and DL [n] is the deletion length of the microhomology n.

[0179] In some embodiments, 0.25 may be a hyperparameter value chosen to improve training speed by appropriate scaling. However, it should be appreciated that aspects of the present disclosure are not limited to the use of any particular hyperparameter value for exponential conversion, or any conversion at all. In some embodiments, the vector ψ of raw scores may be used directly as MH scores.

[0180] FIG. 4B shows an illustrative neural network 400B for computing MH-less scores, in accordance with some embodiments. For instance, the neural network 400B may be used in the illustrative MH-less deletion module 310 in the example of FIG. 3A, and may be trained at act 365 of the illustrative process 350 shown in FIG. 3B.

[0181] In some embodiments, deletion length may be modeled explicitly as an input to the neural network 400B. Thus, in an example where the set of deletion lengths of interest is 1-60, an input node of the neural network 400B may receive a deletion length vector, [1, 2, . . . , 60].

[0182] In some embodiments, the neural network 400B may include one or more hidden layers, each having one or more nodes. In the example shown in FIG. 4B, the neural network 400B has two hidden layers that are similarly constructed as the illustrative neural network 400A in the example of FIG. 4A. However, it should be appreciated that aspects of the present disclosure are not limited to the use of a similar construction between the neural network 400A and the neural network 400B.

[0183] In some embodiments, the neural network 400B may have an output node producing a vector ψ_{MH-less} of scores. There may be one score for each deletion length L of interest. Thus, in an example where the set of deletion lengths of interest is 1-60, the length of the vector ψ_{MH-less} may be 60.

[0184] In some embodiments, an exponential linear model may be used to convert the vector ψ_{MH-less} into a vector ϕ_{MH-less} of MH-less scores. For instance, the following formula may be used:

ϕ_{MH-less}[L]=exp(ψ_{MH-less}[L]−L*0.25),

where L is a deletion length of interest. However, it should be appreciated that aspects of the present disclosure are not limited to the use of any particular hyperparameter value for exponential conversion, or any conversion at all.

[0185] FIG. 4C shows an illustrative process 400C for training two neural networks jointly, in accordance with some embodiments. For instance, the process 400C may be used to jointly train the illustrative neural networks 400A and 400B of FIGS. 4A-4B.

[0186] In some embodiments, the MH score vector ϕ_{MH} and the MH-less score vector may be used to predict a probability distribution over MH deletion genotypes and/or a probability distribution over deletion lengths. For instance, given a microhomology n, a frequency may be predicted for the corresponding MH deletion genotype, out of all MH deletion genotypes. As discussed above, the inventors have recognized and appreciated that there is a one-to-one correspondence between microhomologies and genotypic outcomes that are classified as MH deletions. Thus, n=1 . . . N may be used as an index both for microhomologies and for MH deletions.

[0187] In some embodiments, a frequency prediction for a microhomology n may depend on whether the microhomology n is full. A microhomology n is said to be full if the length of the microhomology n is the same as the deletion length associated with the microhomology n. For a microhomology n that is not full, a frequency may be predicted as follows, out of all MH deletion genotypes.

$${V}_{M H G} [ n ] = \frac{{ϕ}_{M H} [ n ]}{\begin{matrix}{\sum }_{m = 1}^{N} {ϕ}_{M H} [ m ] + {\sum }_{m = 1}^{N} {ϕ}_{MH - less} [ L [ m ] ] * \\ indicator ( microhomology m is full )\end{matrix}}$$

Here DL [m] denotes the deletion length of the microhomology m, and indicator(boolean) equals 1 if boolean is true, and 0 otherwise.

[0188] The inventors have recognized and appreciated that, for a full microhomology, only a single deletion genotype is possible for the entire deletion length. Moreover, the single genotype may be generated via different pathways, such as MMEJ and MH-less end-joining. Therefore, full microhomologies may be modeled as receiving contributions from MH-dependent and an MH-less mechanisms. Thus, for a microhomology n that is full, a frequency may be predicted as follows, out of all MH deletion genotypes.

$${V}_{M H G} [ n ] = \frac{{ϕ}_{M H} [ n ] + {ϕ}_{M H - l e s s} [ D L [ n ] ]}{\begin{matrix}{\sum }_{m = 1}^{N} {ϕ}_{M H} [ m ] + {\sum }_{m = 1}^{N} {ϕ}_{MH - less} [ DL [ m ] ] * \\ indicator ( microhomology m is full )\end{matrix}}$$

[0189] Because the predicted frequencies are normalized. V_{MHG} is a probability distribution over all microhomologies identified for the set of deletion lengths of interest, and hence also a probability distribution over all MH deletions.

[0190] In some embodiments, given a deletion length L, a frequency may be predicted as follows for the set of all deletions having the deletion length L, out of all deletions, taking into account contributions from MH-dependent and MH-less mechanisms.

$${V}_{D L} [ L ] = \frac{{\sum }_{m = 1}^{N} {ϕ}_{M H} [ m ] * indicator ( DL [ m ] == L ) + {ϕ}_{MH - less} [ L ]}{{\sum }_{m = 1}^{N} {ϕ}_{M H} [ m ] + {\sum }_{l = 1}^{60} {ϕ}_{MH - less} [ l ]}$$

Here DL [m] denotes the deletion length of the microhomology m, and indicator(boolean) equals 1 if boolean is true, and 0 otherwise.

[0191] In some embodiments, the parameters w[h] and b[h] for each hidden layer h of the neural networks 400A and 400B may be trained using a gradient descent method with L2-loss:

Loss=Σₘ₌₁^{N}(V_{MHG}[m]−V*_{MHG}[m])²+Σₗ₌₁⁶⁰(V_{DL}[l]−V*_{DL}[l])²,

where V*_{MHG} is an observed probability distribution on MH deletion genotypes, and V*_{DL} is an observed probability distribution on deletion lengths (e.g., based on repair genotype data collected from CRISPR/Cas9 experiments).

[0192] In some embodiments, multiple instantiations of the neural networks 400A and 400B may be trained with different loss functions. For instance, in addition to, or instead of L2-loss, a squared Pearson correlation function may be used.

Loss=−(pearsonr(V_{MHG}[m],V*_{MHG}[m]))²−(pearsonr(V_{MHG}[m],V*_{MHG}[m]))²

The function pearsonr(x, y) may be defined as follows for length N vectors x and y, where x̅ and y̅ denote the averages of x and y, respectively.

$$pearsonr ( x , y ) = \frac{{\sum }_{m = 1}^{N} ( x [ m ] - \overline{x} ) ( y [ m ] - \overline{y} )}{\sqrt{{\sum }_{m = 1}^{N} {( x [ m ] - \overline{x} )}^{2}} \sqrt{{\sum }_{m = 1}^{N} {( y [ m ] - \overline{y} )}^{2}}}$$

[0193] Although neural networks are used in the examples shown in FIGS. 4A-4C, it should be appreciated that aspects of the present disclosure are not so limited. For instance, in some embodiments, one or more other types of machine learning techniques, such as linear regression, non-linear regression, random-forest regression, etc., may be used additionally or alternatively.

[0194] Furthermore, in some embodiments, one or more neural networks that are different from the neural networks 400A and 400B may be used additionally or alternatively. As one example, a different activation function may be used for one or more nodes, such as sigma(x)=max(0, x) (rectified linear unit, or ReLU), sigma(x)=max(0.001x, x) (another example of leaky ReLU), sigma(x)=0.5*(tan h(x)+1.0) or

$$sigma ( x ) = \frac{1}{1 + {e}^{- x}} ( Sigmoid ) ,$$

sigma(x)=max(0, x)+min(0, x)*0.5*(tan h(x)+1) (Swish), etc. As another example, batch normalization may be performed at one or more hidden layers. It should be appreciated that aspects of the disclosure are not limited to training the neural networks 400A and 400B jointly. For instance, given a microhomology n, a frequency may be predicted as follows for the corresponding MH deletion genotype, out of all MH deletion genotypes.

$${V}_{M H G}^{′} [ n ] = \frac{{ϕ}_{M H} [ n ]}{{\sum }_{m = 1}^{N} {ϕ}_{M H} [ m ]}$$

Since this prediction does not depend on the ϕ_{MH-less} scores, the neural network 400A may be trained independently.

[0195] In some embodiments, one or more other probability distributions may be predicted in addition to, or instead of V_{MHG} and V_{DL}. As one example, given a microhomology n, a frequency may be predicted as follows for the corresponding MH deletion genotype, out of all deletion genotypes (both MH and MH-less).

$${V}_{M H G}^{″} [ n ] = \frac{{ϕ}_{M H} [ n ]}{{\sum }_{m = 1}^{N} {ϕ}_{M H} [ m ] + {Σ}_{l = 1}^{60} {ϕ}_{MH - less} [ l ]}$$

[0196] As another example, for a microhomology n that is not full, a frequency may be predicted as follows, out of all deletion genotypes (both MH and MH-less).

$${V}_{M H G}^{′′′} [ n ] = \frac{{ϕ}_{M H} [ n ]}{{\sum }_{m = 1}^{N} {ϕ}_{M H} [ m ] + {\sum }_{l = 1}^{60} {ϕ}_{MH - less} [ l ]}$$

For a microhomology n that is full, a frequency may be predicted as follows, out of all deletion genotypes (both MH and MH-less).

$${V}_{M H G}^{′′′} [ n ] = \frac{{ϕ}_{M H} [ n ] + {ϕ}_{MH - less} [ D L ( n ) ]}{{\sum }_{m = 1}^{N} {ϕ}_{M H} [ m ] + {\sum }_{l = 1}^{60} {ϕ}_{MH - less} [ l ]}$$

Here DL[n] denotes the deletion length of the microhomology n.

[0197] As another example, given a deletion length L, a frequency may be predicted as follows for the set of MH-less deletions having the deletion length L, out of all MH-less deletion genotypes.

$${V}_{D L}^{′} [ L ] = \frac{{ϕ}_{MH - less} [ L ]}{{\sum }_{l = 1}^{60} {ϕ}_{MH - less} [ l ]}$$

[0198] As another example, given a deletion length L, a frequency may be predicted as follows for the set of MH-less deletions having the deletion length L, out of all deletion genotypes (both MH and MH-less).

$${V}_{D L}^{″} [ L ] = \frac{{ϕ}_{MH - less} [ L ]}{{\sum }_{m = 1}^{N} {ϕ}_{M H} [ m ] + {\sum }_{l = 1}^{60} {ϕ}_{MH - less} [ l ]}$$

[0199] Any one or more of the above predicted probability distributions may be used to train the neural networks 400A and 400B, with some suitable loss function.

[0200] FIG. 4D shows an illustrative implementation of the insertion module 315 shown in FIG. 3A, in accordance with some embodiments. In this example, the insertion module 315 includes two models. First, an insertion rate model 405 may be constructed to predict, given an input DNA sequence and a cut site, a frequency of 1 base pair insertions out of all +1 to −60 indels (i.e., 1 base pair insertions and 1-60 base pair deletions). Second, an insertion base pair model 410 may be constructed to predict frequencies of 1 base pair insertion genotypes (i.e., A, C, G, T), again out of all +1 to −60 indels (i.e., 1 base pair insertions and 1-60 base pair deletions). However, it should be appreciated that aspects of the present disclosure are not limited to any particular set of indels. In some embodiments, a small set of indels (e.g., 1 base pair insertions and 1-28 base pair deletions) may be considered, for instance, when less training data is available.

[0201] In some embodiments, the insertion rate model 405 may have one or more input features, which may be encoded as an M-dimensional vector of values for some suitable M. The insertion rate model 405 may have at least one output value. A set of training data for the insertion rate model 405 may include a plurality of M-dimensional training vectors and respective output values. Given an M-dimensional query vector, a k-nearest neighbor (k-NN) algorithm with weighting by inverse distance may be used to compute a predicted output value for the query vector. For instance, k=5 may be used, and five training vectors that are closest to the query vector may be identified, and a predicted output value for the query vector may be computed as a sum of the output values corresponding to the five closest training vectors, weighted by inverse distance, as follows.

$$y = {\sum }_{i = 1}^{5} \hat{y} [ i ] * ( \frac{{\sum }_{j = 1}^{5} d ( x , \hat{x} [ j ] ) - d ( x , \hat{x} [ i ] )}{{\sum }_{j = 1}^{5} d ( x , \hat{x} [ j ] )} )$$

Here x is the query vector, d is a distance function for the M-dimensional vector space, \hat{x}[1], . . . , \hat{x}[5] are the five closest training vectors, ŷ[1], . . . , ŷ[5] are the output values corresponding respectively to \hat{x}[1], . . . , \hat{x}[5], and y is the predicted output value for the query vector x.

[0202] It should be appreciated that aspects of the present disclosure are not limited to the use of any particular k, or to the use of any k-NN algorithm. For instance, any one or more of the following techniques, and/or Bayesian variants thereof, may be used in addition to, or instead of k-NN: gradient-boosted regression, linear regression, nonlinear regression, multilayer perceptron, deep neural network, etc. Also, any suitable distance metric d may be used, such as Euclidean distance.

[0203] In some embodiments, the insertion rate model 405 may have three input features: overall deletion score, precision score, and one or more cut site nucleotides. The overall deletion score may be computed based on outputs of the MH deletion module 305 and the MH-less deletion module 310 in the example of FIG. 3A, for instance, as follows.

$$ϕ = {{\sum }^{N}}_{m = 1} {ϕ}_{MH} [ m ] + {\sum }_{l = 1}^{60} {ϕ}_{MH - less} [ l ]$$

Alternatively, log (ϕ) may be used as the overall deletion score.

[0204] In some embodiments, the precision score may be indicative of an amount of entropy in predicted frequencies of a suitable set of deletion lengths. The inventors have recognized and appreciated that it may be desirable to calculate precision based on a large set of deletion lengths, but in some instances a smaller set (e.g., 1-28) may be used due to one or more constraints associated with available data. As discussed above, given a deletion length L, a frequency may be predicted as follows for the set of all deletions having the deletion length L, out of all deletions, taking into account contributions from MH-dependent and MH-less mechanisms.

$${V}_{D L} [ L ] = \frac{{\sum }_{m = 1}^{N} {ϕ}_{M H} [ m ] * indicator ( D L [ m ] == L ) + {ϕ}_{M H - l e s s} [ L ]}{{\sum }_{m = 1}^{N} {ϕ}_{M H} [ m ] + {\sum }_{l = 1}^{60} {ϕ}_{M H - l e s s} [ l ]}$$

Here DL [m] denotes the deletion length of the microhomology m, and indicator(boolean) equals 1 if boolean is true, and 0 otherwise. The precision score may be computed as follows.

$$precision = 1 - \frac{- {\sum }_{L = 1}^{28} {V}_{D L} [ L ] * log ( {V}_{D L} [ L ] )}{log ( 28 )}$$

[0205] In some embodiments, the one or more cut site nucleotides may include nucleotides on either side of the cut site (i.e., seq[−1] and seq[0]). In the example shown in FIG. 1, the cut site nucleotides are G and G, which are the third and fourth nucleotides to the left of the PAM sequence 115. However, it should be appreciated that aspects of the present disclosure are not limited to the use of two cut side nucleotides as input features to the insertion rate model 405. For instance, only one cut side nucleotide (e.g., seq[−1], which may be the fourth nucleotide to the left of the PAM sequence) may be used when less training data is available, whereas more than two cut side nucleotides (e.g., seq[−2], seq[−1], and seq[0], which may be the third, fourth, and fifth nucleotides to the left of the PAM sequence) may be used when more training data is available.

[0206] In some embodiments, one or more input features to the insertion rate model 405 may be encoded in some suitable manner. For instance, the one or more cut site nucleotides may be one-hot encoded, for example, as follows.
[0207] A=1000, C=0100, G=0010, T=0001

[0208] In some embodiments, encoded input features may be concatenated to form an input vector. In an example in which two cut side nucleotides are used, an input vector may have a length of 10: four for each of the two cut side nucleotides, one for the precision score, and one for the overall deletion score.

[0209] In some embodiments, training data for a certain input DNA sequence may be organized into a matrix X. Each row in the matrix (X[i, −]) may correspond to a possible cut site, and may store a length M training vector for that cut site (e.g., M=10). In some embodiments, each column in the matrix (X[−,j]) may be normalized to mean 0 and variance 1, as follows.

$$X [ i , j ] = \frac{X [ i , j ] - mean ( X [ - , j ] )}{var ( X [ - , j ] )}$$

[0210] In some embodiments, values in a query vector may be normalized in a like fashion. For instance, a jth value in a query vector x may be normalized as follows.

$$x [ i ] = \frac{x [ j ] - mean ( X [ - , j ] )}{var ( X [ - , j ] )}$$

[0211] In some embodiments, an output value may be computed for each row in the training matrix X. For instance, an output value Y[i], i corresponding to a possible cut site, may be a frequency of observed 1 base pair insertions, relative to all observed +1 to −60 indels, at that cut site.

[0212] In some embodiments, the insertion base pair model 410 may be constructed to predict frequencies of 1 base pair insertion genotypes (i.e., A, C, G, T). For instance, the insertion base pair model 410 may predict that the probability of a certain insertion genotype given one or more cut site nucleotides is the same as the frequency of that insertion genotype as observed in a subset of training data in which those one or more cut site nucleotides are observed. Thus, given an input DNA sequence seq and a cut site, the insertion base pair model 410 may determine one or more cut site nucleotides (e.g., seq[−1]=“C”). The insertion base pair model 410 may then score the insertion genotypes A as follows.

ϕᵢₙₛ[“A”]=y*ObsFreq(“A”|seq[−1]=“C”)

[0213] Here y is the frequency of 1 base pair insertions as predicted by the insertion rate model 405, and ObsFreq (“A” I seq[−1]=“C”) is the observed frequency of insertion genotype A given that the nucleotide to the left of the cut site C. The other three insertion genotypes may be scored similarly.

[0214] In some embodiments, more than one cut site nucleotides may be considered. For instance, the insertion base pair model 410 may determine that seq[−2]=“A”, seq[−1]=“C”, and seq[0]=“G”. The insertion base pair model 410 may then score the insertion genotypes A as follows, and the other three insertion genotypes may be scored similarly.

ϕᵢₙₛ[“A”]=y*ObsFreq(“A”|seq[−2]=“A” & seq[−1]=“C” & seq[0]=“G”)

[0215] In some embodiments, a frequency of 1 base pair insertion genotype A, out of all +1 to −60 indels (i.e., 1 base pair insertions and 1-60 base pair deletions), may be predicted as follows. Frequencies for the other three insertion genotypes may be predicted similarly.

$${V}_{i n s} [ “ A ” ] = \frac{{ϕ}_{i n s} [ “ A ” ]}{{\sum }_{m = 1}^{N} {ϕ}_{M H} [ m ] + {\sum }_{l = 1}^{60} {ϕ}_{MH - less} [ l ] + \\ {ϕ}_{i n s} [ “ A ” ] + {ϕ}_{i n s} [ “ C ” ] + {ϕ}_{i n s} [ “ G ” ] + {ϕ}_{i n s} [ “ T ” ]}$$

[0216] In some embodiments, a frequency of 1 base pair insertions, out of all +1 to −60 indels (i.e., 1 base pair insertions and 1-60 base pair deletions), may be predicted as follows.

$${V}_{i n s} = \frac{{ϕ}_{i n s} [ “ A ” ] + {ϕ}_{i n s} [ “ C ” ] + {ϕ}_{i n s} [ “ G ” ] + {ϕ}_{i n s} [ “ T ” ]}{{\sum }_{m = 1}^{N} {ϕ}_{M H} [ m ] + {\sum }_{l = 1}^{60} {ϕ}_{MH - less} [ l ] + \\ {ϕ}_{i n s} [ “ A ” ] + {ϕ}_{i n s} [ “ C ” ] + {ϕ}_{i n s} [ “ G ” ] + {ϕ}_{i n s} [ “ T ” ]}$$

[0217] In some embodiments, given a deletion length L, a frequency may be predicted as follows for the set of all deletions having the deletion length L, out of all +1 to −60 indels (i.e., 1 base pair insertions and 1-60 base pair deletions), taking into account contributions from MH-dependent and MH-less mechanisms.

$${V}_{DL + ins} [ L ] = \frac{{\sum }_{m = 1}^{N} {ϕ}_{MH} [ m ] * indicator ( DL [ m ] == L ) + {ϕ}_{MH - less} [ L ]}{{\sum }_{m = 1}^{N} {ϕ}_{M H} [ m ] + {\sum }_{l = 1}^{60} {ϕ}_{MH - less} [ l ] + \\ {ϕ}_{i n s} [ “ A ” ] + {ϕ}_{i n s} [ “ C ” ] + {ϕ}_{i n s} [ “ G ” ] + {ϕ}_{i n s} [ “ T ” ]}$$

[0218] In some embodiments, given a deletion length L, a frequency may be predicted as follows for the set of MH-less deletions having the deletion length L, out of all +1 to −60 indels (i.e., 1 base pair insertions and 1-60 base pair deletions).

$${V}_{DL + ins}^{″} [ L ] = \frac{{ϕ}_{MH - less} [ L ]}{{\sum }_{m = 1}^{N} {ϕ}_{M H} [ m ] + {\sum }_{l = 1}^{60} {ϕ}_{MH - less} [ l ] + \\ {ϕ}_{i n s} [ “ A ” ] + {ϕ}_{i n s} [ “ C ” ] + {ϕ}_{i n s} [ “ G ” ] + {ϕ}_{i n s} [ “ T ” ]}$$

[0219] In some embodiments, given a microhomology n, a frequency may be predicted as follows for the corresponding MH deletion genotype, out of all +1 to −60 indels (i.e., 1 base pair insertions and 1-60 base pair deletions).

$${V}_{MHG + ins}^{″} [ n ] = \frac{{ϕ}_{MH} [ n ]}{{\sum }_{m = 1}^{N} {ϕ}_{M H} [ m ] + {\sum }_{l = 1}^{60} {ϕ}_{MH - less} [ l ] + \\ {ϕ}_{i n s} [ “ A ” ] + {ϕ}_{i n s} [ “ C ” ] + {ϕ}_{i n s} [ “ G ” ] + {ϕ}_{i n s} [ “ T ” ]}$$

[0220] In some embodiments, for a microhomology n that is not full, a frequency may be predicted as follows, out of all +1 to −60 indels (i.e., 1 base pair insertions and 1-60 base pair deletions).

$${V}_{MHG + ins}^{′′′} [ n ] = \frac{{ϕ}_{MH} [ n ]}{{\sum }_{m = 1}^{N} {ϕ}_{M H} [ m ] + {\sum }_{l = 1}^{60} {ϕ}_{MH - less} [ l ] + \\ {ϕ}_{i n s} [ “ A ” ] + {ϕ}_{i n s} [ “ C ” ] + {ϕ}_{i n s} [ “ G ” ] + {ϕ}_{i n s} [ “ T ” ]}$$

[0221] For a microhomology n that is full, a frequency may be predicted as follows, out of all +1 to −60 indels (i.e., 1 base pair insertions and 1-60 base pair deletions).

$${V}_{MHG + ins}^{′′′} [ n ] = \frac{{ϕ}_{MH} [ n ] + {ϕ}_{MH - less} [ DL ( n ) ]}{{\sum }_{m = 1}^{N} {ϕ}_{M H} [ m ] + {\sum }_{l = 1}^{60} {ϕ}_{MH - less} [ l ] + \\ {ϕ}_{i n s} [ “ A ” ] + {ϕ}_{i n s} [ “ C ” ] + {ϕ}_{i n s} [ “ G ” ] + {ϕ}_{i n s} [ “ T ” ]}$$

[0222] Here DL [n] denotes the deletion length of the microhomology n.

[0223] FIG. 5 shows an illustrative process 500 for processing data collected from CRISPR/Cas9 experiments, in accordance with some embodiments. For instance, the process 500 may be performed for each input DNA sequence and CRISPR/Cas9 cut site, and a resulting dataset may be used to train the illustrative computational models described in connection with FIGS. 4A-4D.

[0224] At act 505, repair genotypes observed from CRISPR/Cas 9 experiments may be aligned with an original DNA sequence. Any suitable technique may be used to observe the repair genotypes, such as Illumina DNA sequencing. Any suitable alignment algorithm may be used for alignment, such as a Needleman-Wunsch algorithm with some suitable scoring parameters (e.g., +1 for match, −2 for mismatch, −4 for gap open, and −1 for gap extend, or +1 for match, −1 for mismatch, −5 for gap open, and −0 for gap extend).

[0225] At act 510, one or more filter criteria may be applied to alignment reads from act 505. For instance, in some embodiments, only those reads in which a deletion includes at least one base directly 5′ or 3′ of the CRISPR/Cas9 cut site are considered. This may filter out deletions that are unlikely to have resulted from CRISPR/Cas9.

[0226] At act 515, frequencies of indels of interest (e.g., from +1 to −60) may be normalized into a probability distribution.

[0227] FIG. 6 shows an illustrative process 600 for using a machine learning model to predict frequencies of indel genotypes and/or indel lengths, in accordance with some embodiments. Acts 605 and 610 may be similar to, respectively, acts 355 and 360 of the illustrative process 350 of FIG. 3B, except that acts 605 and 610 may be performed for an input DNA sequence seq and a cut site location for which repair genotype data from an CRISPR/Cas9 experiment may not be available. At act 615, one or more machine learning models, such as the machine learning models trained at act 365 of the illustrative process 350 of FIG. 3B, may be applied to an output of act 610 to compute a frequency distribution over deletion lengths of interest.

[0228] The inventors have recognized and appreciated that, while Cas9 is typically understood to induce a blunt-end double-strand break, some evidence suggests that Cas9 may generate a 1 base pair staggered end cut instead. FIG. 7 shows illustrative examples of a blunt-end cut and a staggered cut, in accordance with some embodiments.

[0229] FIG. 8A shows an illustrative plot 800A of predicted repair genotypes, in accordance with some embodiments. For instance, the plot 800A may be generated by applying one or more of the illustrative techniques described in connection with FIGS. 2A-2D, 3A-3B, 4A-4D, 5-6 to the example shown in FIG. 1. Each vertical bar may correspond to a deletion length, and a height of the bar may correspond to a predicted frequency of that deletion length. The lighter color may indicate repair genotypes that successfully eliminate the donor splice site motif, whereas the darker color may indicate failure. In this example, about 90% of repair products in the 3-26 base pair deletion class are predicted to be successful for the illustrative local sequence context and cut site shown in FIG. 1.

[0230] The inventors have recognized and appreciated that the 3-26 base pair deletion class may occur as frequently as 50%, for example, when assaying selected sequences (e.g., patient genotypes underlying certain diseases) integrated into the genome of mouse embryonic stem cells, with a 14-day exposure to CRISPR/Cas9. Thus, in view of the 90% success rate predicted above for the 3-26 base pair deletion class, a genetic editing approach using CRISPR-Cas9 may be provided that achieves a desired result with a 45% rate. In contrast, genetic editing using HDR may achieve a success rate of 10% or lower, and may require a more complex experimental protocol.

[0231] FIG. 8B shows another illustrative plot 800B of predicted repair genotypes, in accordance with some embodiments. For instance, the plot 800B may be generated by applying one or more of the illustrative techniques described in connection with FIGS. 2A-2D, 3A-3B, 4A-4D, 5-6 to an illustrative DNA sequence 805B, which may be associated with spinal muscular atrophy (SMA).

[0232] In some patients, a specific single nucleotide polymorphism (SNP) in exon 7 of the SMA2 gene may induce exon skipping of exon 7, erroneously including exon 8 instead. Exon 8 includes a protein degradation signal (namely, EMLA-STOP, as shown in FIG. 8B), which causes degradation in the SMA2 gene product, thereby inducing spinal muscular atrophy. In this region, a disease genotype must have precisely EMLA-STOP. Nearly any other genotype is considered healthy.

[0233] In the example of FIG. 8B, each vertical bar corresponds to a deletion length, and a height of the bar corresponds to a predicted frequency of that deletion length. The lighter color may indicate repair genotypes that successfully disrupt the EMLA-STOP signal, whereas the darker color may indicate failure. In this example, over 90% of repair products in the 3-26 base pair deletion class are predicted to be healthy.

[0234] FIG. 8C shows another illustrative plot 800C of predicted repair genotypes, in accordance with some embodiments. For instance, the plot 800C may be generated by applying one or more of the illustrative techniques described in connection with FIGS. 2A-2D, 3A-3B, 4A-4D, 5-6 to an illustrative DNA sequence associated with breast-ovarian cancer.

[0235] In the example of FIG. 8C, a clinical observed patient genotype includes an abnormal duplication of 14 base pairs that a wild type sequence from a normal/health individual lacks. The patient genotype is incorporated into the genome of mouse embryonic stem cells, and then CRISPR/Cas9 is applied. It is observed that the 3-26 base pair deletion class occurs 65% out of all repair classes at this local sequence context. Moreover, as shown in FIG. 8C, repair to wild type is observed to occur at 89% rate among all 3-26 base pair deletions. Thus, an overall wild type repair rate is about 57%.

[0236] FIG. 8D shows a microhomology identified in the example of FIG. 8C.

[0237] As discussed above, the inventors have recognized and appreciated at least two tasks of interest: predicting frequencies of deletion lengths, as well as predicting frequencies of repair genotypes. In some embodiments, a single machine learning model may be provided that performs both tasks.

[0238] In some embodiments, repair genotypes corresponding to a deletion of length L may be labeled as follows: for every integer K ranging from 0 to L, a K-genotype associated with deletion length L may be obtained by concatenating left[L][−inf: K] with right[L][K: +inf]. A vector COLLECTION of length Q where each element is a tuple (K, L) may be constructed by enumerating each K-genotype for each deletion length L of interest and removing tuples that have the same repair genotype, e.g., (k′, L) and (k, L) such that left[L][−inf: k′] concatenated with right[L][k′: +inf] is equivalent to left[L][−inf: k] concatenated with right[L][k: +inf], for example, by retaining only the tuple with the larger K. A training data set may be constructed using observational data by constructing a vector X of length Q where X sums to 1 and X[q] represents an observed frequency of a repair genotype generated by COLLECTION[q].

[0239] In some embodiments, the vector COLLECTION may be featurized. This may be performed for a given tuple (k, 1) by determining whether there is an index i such that match[l][i: k] is a microhomology. If no such i exists, then the tuple (k, 1) may be considered to not partake in microhomology.

[0240] The inventors have recognized and appreciated that frequencies of repair products may be influenced by certain features of microhomologies such as microhomology length, fraction of G-C pairings, and/or deletion length. The inventors have also recognized and appreciated that some default values may be useful for repair genotypes that are considered to not partake in microhomology.

[0241] For example, the inventors have recognized and appreciated that energetic stability of a microhomology may increase proportionately with a length of the microhomology. Accordingly, in some embodiments, the microhomology length k−i may be used for a tuple (k, 1), and a default value of 0 may be used if (k, 1) does not partake in microhomology.

[0242] As another example, the inventors have recognized and appreciated that thermodynamic stability of a microhomology may depend on specific base pairings, and that G-C pairings have three hydrogen bonds and therefore have higher thermodynamic stability than A-T pairings, which have two hydrogen bonds. Accordingly, in some embodiments, a GC fraction, as shown below, may be used as a feature for (k, 1), where indicator (boolean) equals 1 if Boolean is true, and 0 otherwise. A default value of −1 may be used if (k, 1) does not partake in microhomology.

$$\frac{{\sum }_{j = 1}^{k - 1} indicator ( lef t [ l ] [ j ] = {}_{}^{′}{G}{}_{}^{′} {or }^{′} {C}^{′} )}{k - i}$$

[0243] In some embodiments, a feature for deletion length may be considered, represented as l for the tuple (k, l).

[0244] The inventors have also recognized and appreciated (e.g., from experimental data) that 0-genotype and l-genotype repair products may occur despite a lack of microhomology, and may occur through microhomology-free end-joining repair pathways. Accordingly, (k, l) may be featurized with a Boolean for 0-genotype that is equal to 1 if k=0 and (k, l) does not partake in microhomology, and 0 otherwise. A Boolean feature for l-genotypes may also be used where it is equal to 1 if k=l and (k, l) does not partake in microhomology, and 0 otherwise.

[0245] FIG. 9 shows another illustrative neural network 900 for computing a frequency distribution over deletion lengths, in accordance with some embodiments.

[0246] In some embodiments, the neural network 900 may be parameterized by w[h] and b[h] for each hidden layer h. In some embodiments, these parameters may be initialized randomly, for example, from a spherical Gaussian distribution with some suitable center (e.g., 0) and some suitable variance (e.g., 0.1). These parameters may then be trained using repair genotype data collected from CRISPR/Cas9 experiments.

[0247] In some embodiments, the neural network 900 may operate independently for each microhomology, taking as input the length of that microhomology (from the first input node), the GC fraction of that microhomology (from the second input node), Boolean features for 0 and l-genotypes (from the third and fourth input node, where N-flag corresponds to l-genotypes), and the length of the deletion (from the fifth input node), transforming those five values into 16 values (at the first hidden layer), then transforming those 16 values into 16 other values (at the second hidden layer), and finally outputting a single value (at the output node). In such an embodiment, parameters for the first hidden layer, w[1][i] and b[1][i], are vectors of length 5 for each node i from 1 to 16, whereas parameters for the second hidden layer, w[2][i] and b[2][i], are vectors of length 16 for each node i from 1 to 16, and parameters for the output layer, w[3][1] and b[3][1], are also vectors of length 16.

[0248] In some embodiments, the neural network 900 may be applied independently (e.g., as discussed above) to each featurized (k, l) in COLLECTIONS to produce a vector of Q microhomology scores called Z.

[0249] In some embodiments, Z may be normalized into a probability distribution over all unique repair genotypes of interest within all deletion lengths of interest (e.g., deletion lengths between 3 and 26). The inventors have recognized and appreciated (e.g., from experimental data) that frequency may decrease exponentially with deletion length. Accordingly, in some embodiments, an exponential linear model may be used to normalize the vector of repair genotype scores. For example, the following formula may be used:

$$Y [ q ] = \frac{exp ( Z [ q ] - beta * D L [ q ] )}{{\sum }_{{q}^{′} = 1}^{Q} exp ( Z [ {q}^{′} ] - beta * D L [ {q}^{′} ] )}$$

where DL[q]=1 for each q where COLLECTIONS[q]=(k, l), and beta is a parameter.

[0250] In some embodiments, a probability distribution Y over all unique repair genotypes of interest within all deletion lengths of interest may be converted to a probability distribution Y′ over all deletion lengths. The following formula may be used for this:

$${Y}^{′} [ l ] = \frac{{\sum }_{q = 1}^{Q} Y [ q ] * indicator ( D L [ q ] = l )}{{\sum }_{q = 1}^{Q} Y [ q ]}$$

[0251] In some embodiments, the parameter beta may be initialized to −1. These parameters may then be trained using repair genotype data collected from CRISPR/Cas9 experiments.

[0252] In some embodiments, the parameters w[h] and b[h] for each hidden layer h and the parameters beta may be trained by using a gradient descent method with L2-loss on Y:

L(predY,obsY)=∥predY−obsY∥₂²,

[0253] where predY is a predicted probability distribution on deletion lengths (e.g., as computed by the neural network 900 using current parameter values), and obsY is an observed probability distribution on deletion lengths (e.g., based on repair genotype data collected from CRISPR/Cas9 experiments).

[0254] The inventors have recognized and appreciated that one or more of the techniques described herein may be used to identify therapeutic guide RNAs that are expected to produce a therapeutic outcome when used in combination with a genomic editing system without an HDR template. For instance, one or more of the techniques described herein may be used to identify a therapeutic guide RNA that is expected to result in a substantial fraction of genotypic consequences that cause a gain-of-function mutation in DNA in the absence of an HDR template. A therapeutic guide RNA may be used singly, or in combination with other therapeutic guide RNAs. An action of the therapeutic guide RNA may be independent of, or dependent on, one or more genomic consequences of the other therapeutic guide RNAs.

[0255] FIG. 10 shows, schematically, an illustrative computer 1000 on which any aspect of the present disclosure may be implemented. In the embodiment shown in FIG. 10, the computer 1000 includes a processing unit 1001 having one or more processors and a non-transitory computer-readable storage medium 1002 that may include, for example, volatile and/or non-volatile memory. The memory 1002 may store one or more instructions to program the processing unit 1001 to perform any of the functions described herein. The computer 1000 may also include other types of non-transitory computer-readable medium, such as storage 1005 (e.g., one or more disk drives) in addition to the system memory 1002. The storage 1005 may also store one or more application programs and/or external components used by application programs (e.g., software libraries), which may be loaded into the memory 1002.

[0256] The computer 1000 may have one or more input devices and/or output devices, such as devices 1006 and 1007 illustrated in FIG. 10. These devices can be used, among other things, to present a user interface. Examples of output devices that can be used to provide a user interface include printers or display screens for visual presentation of output and speakers or other sound generating devices for audible presentation of output. Examples of input devices that can be used for a user interface include keyboards and pointing devices, such as mice, touch pads, and digitizing tablets. As another example, the input devices 1007 may include a microphone for capturing audio signals, and the output devices 1006 may include a display screen for visually rendering, and/or a speaker for audibly rendering, recognized text.

[0257] As shown in FIG. 10, the computer 1000 may also comprise one or more network interfaces (e.g., the network interface 1010) to enable communication via various networks (e.g., the network 1020). Examples of networks include a local area network or a wide area network, such as an enterprise network or the Internet. Such networks may be based on any suitable technology and may operate according to any suitable protocol and may include wireless networks, wired networks or fiber optic networks.

[0258] Having thus described several aspects of at least one embodiment, it is to be appreciated that various alterations, modifications, and improvements will readily occur to those skilled in the art. Such alterations, modifications, and improvements are intended to be within the spirit and scope of the present disclosure. Accordingly, the foregoing description and drawings are by way of example only.

[0259] The above-described embodiments of the present disclosure can be implemented in any of numerous ways. For example, the embodiments may be implemented using hardware, software or a combination thereof. When implemented in software, the software code can be executed on any suitable processor or collection of processors, whether provided in a single computer or distributed among multiple computers.

[0260] Also, the various methods or processes outlined herein may be coded as software that is executable on one or more processors that employ any one of a variety of operating systems or platforms. Additionally, such software may be written using any of a number of suitable programming languages and/or programming or scripting tools, and also may be compiled as executable machine language code or intermediate code that is executed on a framework or virtual machine.

[0261] In this respect, the concepts disclosed herein may be embodied as a non-transitory computer-readable medium (or multiple computer-readable media) (e.g., a computer memory, one or more floppy discs, compact discs, optical discs, magnetic tapes, flash memories, circuit configurations in Field Programmable Gate Arrays or other semiconductor devices, or other non-transitory, tangible computer storage medium) encoded with one or more programs that, when executed on one or more computers or other processors, perform methods that implement the various embodiments of the present disclosure discussed above. The computer-readable medium or media can be transportable, such that the program or programs stored thereon can be loaded onto one or more different computers or other processors to implement various aspects of the present disclosure as discussed above.

[0262] The terms “program” or “software” are used herein to refer to any type of computer code or set of computer-executable instructions that can be employed to program a computer or other processor to implement various aspects of the present disclosure as discussed above. Additionally, it should be appreciated that according to one aspect of this embodiment, one or more computer programs that when executed perform methods of the present disclosure need not reside on a single computer or processor, but may be distributed in a modular fashion amongst a number of different computers or processors to implement various aspects of the present disclosure.

[0263] Computer-executable instructions may be in many forms, such as program modules, executed by one or more computers or other devices. Generally, program modules include routines, programs, objects, components, data structures, etc. that perform particular tasks or implement particular abstract data types. Typically the functionality of the program modules may be combined or distributed as desired in various embodiments.

[0264] Also, data structures may be stored in computer-readable media in any suitable form. For simplicity of illustration, data structures may be shown to have fields that are related through location in the data structure. Such relationships may likewise be achieved by assigning storage for the fields with locations in a computer-readable medium that conveys relationship between the fields. However, any suitable mechanism may be used to establish a relationship between information in fields of a data structure, including through the use of pointers, tags or other mechanisms that establish relationship between data elements.

[0265] Various features and aspects of the present disclosure may be used alone, in any combination of two or more, or in a variety of arrangements not specifically discussed in the embodiments described in the foregoing and is therefore not limited in its application to the details and arrangement of components set forth in the foregoing description or illustrated in the drawings. For example, aspects described in one embodiment may be combined in any manner with aspects described in other embodiments.

[0266] In an exemplary embodiment, a computational model described herein is trained with experimental data as outlined in Example 1. The method outlined in Example 1 for training a computational model with experimental data is meant to be non-limiting.

[0267] Accordingly, the specification discloses a method for training a computational model described herein, comprising: (i) preparing a library comprising a plurality of nucleic acid molecules each encoding a nucleotide target sequence and a cognate guide RNA, wherein each nucleotide target sequence comprises a cut site; (ii) introducing the library into a plurality of host cells; (iii) contacting the library in the host cells with a Cas-based genome editing system to produce a plurality of genomic repair products; (iv) determining the sequences of the genomic repair products; and (iv) training the computational model with input data that comprises at least the sequences of the nucleotide target sequence and/or the genomic repair products and the cut sites.

[0268] In another aspect, the specification discloses a method for training a computational model, comprising: (i) preparing a library comprising a plurality of nucleic acid molecules each encoding a nucleotide target sequence and a cut site; (ii) introducing the library into a plurality of host cells; (iii) contacting the library in the host cells with a DSB-based genome editing system to produce a plurality of genomic repair products; (iv) determining the sequences of the genomic repair products; and (iv) training the computational model with input data that comprises at least the sequences of the nucleotide target sequence and/or the genomic repair products and the cut sites.

[0269] Methods for preparing nucleic acid libraries, vectors, host cells, and sequencing methods are well known in the art. The instant description is not meant to be limiting in any way as to the construction and configuration of the libraries described herein for training the computational model.

[0270] Accordingly, the specification provides in one aspect a method of introducing a desired genetic change in a nucleotide sequence using a double-strand brake (DSB)-inducing genome editing system, the method comprising: identifying one or more available cut sites in a nucleotide sequence; analyzing the nucleotide sequence and available cut sites with a computational model to identify the optimal cut site for introducing the desired genetic change into the nucleotide sequence; and contacting the nucleotide sequence with a DSB-inducing genome editing system, thereby introducing the desired genetic change in the nucleotide sequence at the cut site.

[0271] A cut site can be at any position in a nucleotide sequence and its position is not particularly limiting.

[0272] The nucleotide sequence into which a genetic change is desired is not intended to have any limitations as to sequence, source, or length. The nucleotide sequence may comprise one or more mutations, which can include one or more disease-causing mutations.

[0273] In another aspect, the specification provides a method of treating a genetic disease by correcting a disease-causing mutation using a double-strand brake (DSB)-inducing genome editing system, the method comprising: identifying one or more available cut sites in a nucleotide sequence comprising a disease-causing mutation; analyzing the nucleotide sequence and available cut sites with a computational model to identify the optimal cut site for correcting the disease-causing mutation in the nucleotide sequence; and contacting the nucleotide sequence with a DSB-inducing genome editing system, thereby correcting the disease-causing mutation and treating the disease.

[0274] In yet another aspect, the specification provides a method of altering a genetic trait by introducing a genetic change in a nucleotide sequence using a double-strand brake (DSB)-inducing genome editing system, the method comprising: identifying one or more available cut sites in a nucleotide sequence; analyzing the nucleotide sequence and available cut sites with a computational model to identify the optimal cut site for introducing the genetic change into the nucleotide sequence; and contacting the nucleotide sequence with a DSB-inducing genome editing system, thereby introducing the desired genetic change in the nucleotide sequence at the cut site and consequently altering the associated genetic trait.

[0275] In another aspect, the specification provides a method of selecting a guide RNA for use in a Cas-genome editing system capable of introducing a genetic change into a nucleotide sequence of a target genomic location, the method comprising: identifying in a nucleotide sequence of a target genomic location one or more available cut sites for a Cas-based genome editing system; and analyzing the nucleotide sequence and cut site with a computational model to identify a guide RNA capable of introducing the genetic change into the nucleotide sequence of the target genomic location.

[0276] In still another aspect, the specification provides a method of introducing a genetic change in the genome of a cell with a Cas-based genome editing system comprising: selecting a guide RNA for use in the Cas-based genome editing system in accordance with the method of the above aspect; and contacting the genome of the cell with the guide RNA and the Cas-based genome editing system, thereby introducing the genetic change.

[0277] In various embodiments, the cut sites available in the nucleotide sequence are a function of the particular DSB-inducing genome editing system in use, e.g., a Cas-based genome editing system.

[0278] In certain embodiments, the nucleotide sequence is a genome of a cell.

[0279] In certain other embodiments, the method for introducing the desired genetic change is done in vivo within a cell or an organism (e.g., a mammal), or ex vivo within a cell isolated or separated from an organism (e.g., an isolated mammalian cancer cell), or in vitro on an isolated nucleotide sequence outside the context of a cell.

[0280] In various embodiments, the DSB-inducing genome editing system can be a Cas-based genoe editing system, e.g., a type II Cas-based genome editing system. In other embodiments, the DSB-inducing genome editing system can be a TALENS-based editing system or a Zinc-Finger-based genome editing system. In still other embodiments, the DSB-inducing genome editing system can be any such endonuclease-based system which catalyzes the formation of a double-strand break at a specific one or more cut sites.

[0281] In embodiments involving a Cas-based genome editing system, the method can further comprise selecting a cognate guide RNA capable of directing a double-strand break at the optimal cut site by the Cas-based genome editing system.

[0282] In certain embodiments, the guide RNA is selected from the group consisting the guide RNA sequences listed in any of Tables 1-6. In various embodiments, the guide RNA can be known or can be newly designed.

[0283] In various embodiments, the double-strand brake (DSB)-inducing genome editing system is capable of editing the genome without homology-directed repair.

[0284] In other embodiments, the double-strand brake (DSB)-inducing genome editing system comprises a type I Cas RNA-guided endonuclease, or a variant or orthologue thereof.

[0285] In still other embodiments, the double-strand brake (DSB)-inducing genome editing system comprises a type II Cas RNA-guided endonuclease, or a functional variant or orthologue thereof.

[0286] The double-strand brake (DSB)-inducing genome editing system may comprise a Cas9 RNA-guided endonuclease, or a variant or orthologue thereof in certain embodiments.

[0287] In still other embodiments, the double-strand brake (DSB)-inducing genome editing system can comprise a Cpf1 RNA-guided endonuclease, or a variant or orthologue thereof.

[0288] In yet further embodiments, the double-strand brake (DSB)-inducing genome editing system can comprise a Streptococcus pyogenes Cas9 (SpCas9), Staphylococcus pyogenes Cas9 (SpCas9), Staphylococcus aureus Cas (SaCas9), Francisella novicida Cas9 (FnCas9), or a functional variant or orthologue thereof.

[0289] In various embodiments, the desired genetic change to be introduced into the nucleotide sequence, e.g., a genome, is to a correction to a genetic mutation. In embodiments, the genetic mutation is a single-nucleotide polymorphism, a deletion mutation, an insertion mutation, or a microduplication error.

[0290] In still other embodiments, the genetic change can comprises a 2-60-bp deletion or a 1-bp insertion.

[0291] The genetic change in other embodiments can comprise a deletion of between 2-20, or 4-40, or 8-80, or 16-160, or 32-320, 64-640, or up to 1000, 2000, 3000, 4000, 5000, 6000, 7000, 8000, 9000, or 10,000 or more nucleotides. Preferably, the deletion can restore the function of a defective gene, e.g., a gain-of-function frameshift genetic change.

[0292] In other embodiments, the desired genetic change is a desired modification to a wildtype gene that confers and/or alters one or more traits, e.g., conferring increased resistance to a pathogen or altering a monogenic trait (e.g., eye color) or polygenic trait (e.g., height or weight).

[0293] In embodiments involving correcting a disease-causing mutation, the disease can be a monogenic disease. Such monogenic diseases can include, for example, sickle cell disease, cystic fibrosis, polycystic kidney disease, Tay-Sachs disease, achondroplasia, beta-thalassemia, Hurler syndrome, severe combined immunodeficiency, hemophilia, glycogen storage disease Ia, and Duchenne muscular dystrophy.

[0294] In any of the above aspects and embodiments, the step of identifying the available cut sites can involve identifying one or more PAM sequences in the case of a Cas-based genome editing system.

[0295] In various embodiments of the above methods, the computational model used to analyze the nucleotide sequence is a deep learning computational model, or a neural network model having one or more hidden layers. In various embodiments, the computational model is trained with experimental data to predict the probability of distribution of indel lengths for any given nucleotide sequence and cut site. In still other embodiments, the computational model is trained with experimental data to predict the probability of distribution of genotype frequencies for any given nucleotide sequence and cut site.

[0296] In various embodiments, the computational model comprises one or more training modules for evaluating experimental data.

[0297] In various embodiments, the computational model can comprise: a first training module for computing a microhomology score matrix; a second training module for computing a microhomology independent score matrix; and a third training module for computing a probability distribution over 1-bp insertions, wherein once trained with experimental data the computational model computes a probability distribution over indel genotypes and a probability distribution over indel lengths for any given input nucleotide sequence and cut site.

[0298] In other embodiments, the computational model predicts genomic repair outcomes for any given input nucleotide sequence and cut site.

[0299] In various embodiments, the genomic repair outcomes can comprise microhomology deletions, microhomology-less deletions, and/or 1-bp insertions.

[0300] In still other embodiments, the computational model can comprise one or more modules each comprising one more input features selected from the group consisting of: a target site nucleotide sequence; a cut site; a PAM-sequence; microhomology lengths relative at a cut site, % GC content at a cut site; and microhomology deletion lengths at a cut site, and type of DSB-genome editing system.

[0301] In various embodiments, the nucleotide sequence analyzed by the computational model is between about 25-100 nucleotides, 50-200 nucleotides, 100-400 nucleotides, 200-800 nucleotides, 400-1600 nucleotides, 800-3200 nucleotides, and 1600-6400 nucleotide, or even up to 7K, 8K, 9K, 10K, 11K, 12K, 13K, 14K, 15K, 16K, 17K, 18K, 19K, 20K nucleotides, or more in length.

[0302] In another aspect, the specification relates to guide RNAs which are identified by various methods described herein. In certain embodiments, the guide RNAs can be any of those presented in Tables 1-6, the contents of which form part of this specification.

[0303] According to various embodiments, the RNA can be purely ribonucleic acid molecules. However, in other embodiments, the RNA guides can comprise one or more naturally-occurring or non-naturally occurring modifications. In various embodiments, the modifications can including, but are not limited to, nucleoside analogs, chemically modified bases, intercalated bases, modified sugars, and modified phosphate group linkers. In certain embodiments, the guide RNAs can comprise one or more phosphorothioate and/or 5′-N-phosphporamidite linkages.

[0304] In still other aspects, the specification discloses vectors comprising one or more nucleotide sequences disclosed herein, e.g., vectors encoding one or more guide RNAs, one or more target nucleotide sequences which are being edited, or a combination thereof. The vectors may comprise naturally occurring sequences, or non-naturally occurring sequences, or a combination thereof.

[0305] In still other aspects, the specification discloses host cells comprising the herein disclosed vectors encoding one more nucleotide sequences embodied herein, e.g., one or more guide RNAs, one or more target nucleotide sequences which are being edited, or a combination thereof.

[0306] In other aspects, the specification discloses a Cas-based genome editing system comprising a Cas protein (or homolog, variant, or orthologue thereof) complexed with at least one guide RNA. In certain embodiments, the guide RNA can be any of those disclosed in Tables 1-6, or a functional variant thereof.

[0307] In still other aspects, the specification provides a Cas-based genome editing system comprising an expression vector having at least one expressible nucleotide sequence encoding a Cas protein (or homolog, variant, or orthologue thereof) and at least one other expressible nucleotide sequence encoding a guide RNA, wherein the guide RNA can be identified by the methods disclosed herein for selecting a guide RNA.

[0308] In yet another aspect, the specification provides a Cas-based genome editing system comprising an expression vector having at least one expressible nucleotide sequence encoding a Cas protein (or homolog, variant, or orthologue thereof) and at least one other expressible nucleotide sequence encoding a guide RNA, wherein the guide RNA can be identified by the methods disclosed herein for selecting a guide RNA.

[0309] In still a further aspect, the specification provides a library for training a computational model for selecting a guide RNA sequence for use with a Cas-based genome editing system capable of introducing a genetic change into a genome without homology-directed repair, wherein the library comprises a plurality of vectors each comprising a first nucleotide sequence of a target genomic location having a cut site and a second nucleotide sequence encoding a cognate guide RNA capable of directing a Cas-based genome editing system to carry out a double-strand break at the cut site of the first nucleotide sequence.

[0310] In another aspect, the specification provides a library and its use for training a computational model for selecting an optimized cut site for use with a DSB-based genome editing system (e.g., Cas-based system, TALAN-based system, or a Zinc-Finger-based system) that is capable of introducing a desired genetic change into a nucleotide sequence (e.g., a genome) at the selected cut site without homology-directed repair, wherein the library comprises a plurality of vectors each comprising a nucleotide sequence having a cut site, and optionally a second nucleotide sequence encoding a cognate guide RNA (in embodiments involving a Cas-based genome editing system).

[0311] Also, the concepts disclosed herein may be embodied as a method, of which an example has been provided. The acts performed as part of the method may be ordered in any suitable way. Accordingly, embodiments may be constructed in which acts are performed in an order different than illustrated, which may include performing some acts simultaneously, even though shown as sequential acts in illustrative embodiments.

### EXAMPLES

[0312] In order that the invention described herein may be more fully understood, the following examples are set forth. It should be understood that these examples are for illustrative purposes only and are not to be construed as limiting this invention in any manner.

### Example 1: Demonstration of Predictable and Precise Template-Free CRISPR Editing of Pathogenic Variants

### SUMMARY

[0313] DNA double-strand break repair following cleavage by Cas9 is generally considered stochastic, heterogeneous, and impractical for applications beyond gene disruption. Here, it is shown that template-free Cas9 nuclease-mediated DNA repair is predictable in human and mouse cells and is capable of precise repair to a predicted genotype in certain sequence contexts, enabling correction of human disease-associated mutations. A genomically integrated library of guide RNAs (gRNAs) was constructed, each paired with its corresponding DNA target sequence, and trained a machine learning model, inDelphi, on the end-joining repair products of 1,095 sequences cleaved by Cas9 nuclease in mammalian cells. The resulting model accurately predicted frequencies of 1- to 60-bp deletions and 1-bp insertions (median r=0.87) with single-base resolution at 194 held-out library sites and ˜90 held-out endogenous sequence contexts in four human and mouse cell lines. The inDelphi model predicts that 26% of all Streptococcus pyogenes Cas9 (SpCas9) gRNAs targeting the human genome result in outcomes in which a single predictable product accounts for >30% of all edited products, while 5% of gRNAs are “high-precision guides” that result in repair outcomes in which one product accounts for >50% of all edited products. It was experimentally confirmed that 183 human disease-associated microduplication alleles can each be corrected to their wild-type genotypes with >50% frequency among edited products following Cas9 cleavage in mammalian cells. Using these insights, genotypic and functional rescue of pathogenic LDLR microduplication alleles was achieved in human and mouse cells, and restored to wild-type an endogenous genomic Hermansky-Pudlak syndrome (HPS1) pathogenic allele in primary patient-derived fibroblasts. This study establishes that template-free Cas9 nuclease activity can be harnessed for precise genome editing applications.

[0314] More in particular, this study developed a high-throughput Streptococcus pyogenes Cas9 (SpCas9)-mediated repair outcome assay to characterize end-joining repair products at Cas9-induced double-stranded breaks using 1,872 target sites based on sequence characteristics of the human genome. The study used the resulting rich set of repair product data to train the herein disclosed machine-learning algorithm (i.e., inDelphi), which accurately predicts the frequencies of the substantial majority of template-free Cas9-induced insertion and deletion events at single-base resolution (which is further described in M. Shen et al., “Predictable and precise template-free CRISPR editing of pathogenic variants,” Nature, vol. 563, Nov. 29, 2018, pp. 646-651, and including Extended Data). This study finds that in contrast to the notion that end-joining repair is heterogeneous, inDelphi identifies that 5-11% of SpCas9 gRNAs in the human genome induce a single predictable repair genotype in >50% of editing products.

[0315] Building on this idea of precision gRNAs, this study further uses inDelphi to design 14 gRNAs for high-precision template-free editing yielding predictable 1-bp insertion genotypes in endogenous human disease-relevant loci and experimentally confirmed highly precise editing (median 61% among edited products) in two human cell lines. As described herein, inDelphi was used to reveal human pathogenic alleles that are candidates for efficient and precise template-free gain-of-function genotypic correction and achieved template-free correction of 183 pathogenic human microduplication alleles to the wild-type genotype in >50% of all editing products. Finally, these developments were integrated to achieve high-precision correction of five pathogenic low-density lipoprotein receptor (LDLR) microduplication alleles in human and mouse cells, as well as correction of endogenous pathogenic microduplication alleles for Hermansky-Pudlak syndrome (HPS1) and Menkes disease (ATP7A) to the wild-type sequence in primary patient-derived fibroblasts.

### Results

### Cas9-Mediated DNA Repair Products are Predictable

[0316] To capture Cas9-mediated end-joining repair products across a wide variety of target sequences, a genome-integrated gRNA and target library screen was designed in which many unique gRNAs are paired with corresponding 55-bp target sequences containing a single canonical “NGG” SpCas9 protospacer-adjacent motif (PAM) that directs cleavage to the center of each target sequence (FIG. 11A). To explore repair products among sequences representative of the human genome, 1,872 target sequences were computationally designed that collectively span the human genome's distributions of % GC, number of nucleotides participating in microhomology, predicted Cas9 on-target cutting efficiency⁴, and estimated precision of deletion products²⁴ (FIGS. 16A-16C). Through a multi-step process (FIGS. 16A-16C), the library (Lib-A—see Table 4) was cloned into a plasmid backbone allowing Tol2 transposon-based integration into the genome²⁵, gRNA expression, and hygromycin selection for cells with genomically integrated library members.

[0317] Lib-A was stably integrated into the genomes of mouse embryonic stem cells (mESCs). Next, these cells were targeted with a Tol2 transposon-based SpCas9 expression plasmid containing a blasticidin expression cassette and selected for cells with stable Cas9 expression. Sufficient numbers of cells were maintained throughout the experiment to ensure >2,000-fold coverage of the library. After one week, genomic DNA was collected from three independent replicate experiments from these cells and performed paired-end high-throughput DNA sequencing (HTS) using primers flanking the gRNA and the target site to reveal the spectrum of repair products at each target site. Using a sequence alignment procedure, the resulting 96,838,690 sequence reads were tabulated into observed frequencies of, on average, 1,262 unique repair genotypes for each target site.

[0318] To test the correspondence between library repair products and endogenous repair products, Lib-A included the 55-bp sequences surrounding 90 endogenous genomic loci for which the products of Cas9-mediated repair were previously characterized by HTS²⁴. Previously reported repair products from this endogenous dataset (VO) in three human cell lines (HCT116, K562, and HEK293) reveal that 94% of endogenous Cas9-mediated deletions are 30 bp or shorter (FIGS. 16A-16C), suggesting that the Lib-A analysis method is capable of assessing the vast majority of Cas9-mediated editing products. It was found that repair outcomes for these Lib-A members corresponding to the VO sites in mESCs are consistent with previously reported endogenous repair products in human cells (median r=0.76, FIGS. 17A-17D). Lib-A repair genotype frequencies are also consistent between experimental replicates (median r=0.89, FIGS. 17A-17D), confirming that Cas9-mediated editing products of the target library reflect previously reported endogenous target locus editing products in human cells.

[0319] In Lib-A data from mESCs and in the three VO datasets from endogenous HEK293, K562, and HCT116 cells, end-joining repair of Cas9-mediated double-strand breaks primarily causes deletions (73-87% of all products) and insertions (13-25% of all products) (FIGS. 11B, 11C, FIGS. 17A-17D). Rarer Cas9-mediated repair products were also detected such as combination insertion/deletions (0.5-2% of all products) and deletions and insertions distal to the cutsite (3-5% of all products), which occur more often on the PAM-distal side of the double-strand break (FIGS. 17A-17D). The majority of products are deletions containing microhomology consistent with MMEJ (53-58% of all products, and 70-75% of deletions) (FIGS. 11B, 11C, FIGS. 17A-17D for a definition of microhomology-containing deletions).

[0320] Using the wealth of Cas9 outcome data provided by Lib-A, a novel machine learning model, inDelphi, was trained to predict the spectrum of Cas9-mediated editing products at a given target site. This model consists of three interconnected modules aimed at predicting the three major classes of repair outcomes: microhomology deletions (MH deletions), microhomology-less deletions (MH-less deletions), and single-base insertions (1-bp insertions, FIG. 12A). These three repair classes are defined as constituting all major editing outcomes and note that they comprise 80-95% of all observed editing products (FIGS. 11B, 11C). Motivated by the abundance of MH deletion products in Lib-A and VO data, a deep neural network was designed to predict MH deletions as one module of inDelphi. This module simulates MH deletions using the MMEJ repair mechanism, where 5′-to-3′ end resection at a double-strand break reveals two 3′ ssDNA overhangs that can anneal through sequence microhomology. Extraneous ssDNA overhangs are eliminated, and DNA synthesis and ligation generates a dsDNA repair product²⁶ (FIG. 12B). Through this mechanism, each potential microhomology results in a distinct deletion genotype, allowing a 1:1 mapping between possible microhomologies at a target site and available MH deletion outcome genotypes (FIG. 12B). inDelphi models MH deletions as a competition between different MH-mediated hybridization possibilities. Using the input features of MH length, MH % GC, and deletion length, inDelphi outputs a score (phi) reflecting the predicted strength of each microhomology (FIG. 12A). From training data, inDelphi learned that strong microhomologies tend to be long and have high GC content (FIGS. 18A-18H).

[0321] To account for all deletions that cannot be simulated through the MMEJ mechanism, inDelphi also contains a second neural network module that predicts the distribution of MH-less deletion lengths using the minimum required resection length as the only input feature (FIG. 12A). Because there are many MH-less genotypes for each deletion length with frequencies that do not fit a simple pattern, inDelphi predicts the frequencies of deletion lengths but not of genotypic outcomes for MH-less deletions. This module learned from training data that the frequency of MH-less deletions decays rapidly with increasing length (FIGS. 18A-18H). It is hypothesized that MH-less deletions arise primarily from the activity of the classical and alternative NHEJ pathways²⁷. The two neural networks were jointly trained using observed distributions of deletion genotypes from 1,095 Lib-A target sites (FIG. 12A).

[0322] The inDelphi model contains a third module to predict 1-bp insertions (FIG. 12A). In VO and Lib-A data, insertions represent a major class of DNA repair at Cas9-mediated double-strand breaks (13-25% of all products, FIGS. 11B, 11C, FIGS. 17A-17D). Among insertions, 1-bp insertions are dominant (9-21% of all products, FIGS. 11B, 11C, FIGS. 17A-17D). Surprisingly, it was found that the frequency of 1-bp insertions and their resultant genotypes depend strongly on local sequence context. In endogenous and library settings, 1-bp insertions predominantly comprise duplications of the −4 nucleotide (counting the NGG PAM as nucleotides 0-2, FIG. 12A), with higher precision when the −4 nucleotide is an A or T and with lower precision when it is a C or G (FIG. 12C). While 1-bp insertions were observed occurring in 9% of products on average in Lib-A, this frequency varies significantly depending on the nucleotide at position −4, falling to less than 4% on average when the −4 nucleotide is G (FIG. 12D, P<10⁻³⁴). While position −4 is most strongly associated with 1-bp insertion frequency, other surrounding bases also contribute to insertion frequency (FIG. 12E). In addition, it was found that target sites with poor microhomology (low total phi score) and target sites with imprecise deletion product distributions are more likely to contain insertions at the expense of deletions (FIGS. 18A-18H).

[0323] Based on these empirical observations, inDelphi models insertions and deletions as competitive processes in which the total deletion phi score (overall microhomology strength) and predicted deletion precision influence the relative frequency of 1-bp insertions, and the local sequence context influences the relative frequency and genotypic outcomes of 1-bp insertions (FIG. 12A). inDelphi integrates these factors into predictions of 1-bp insertion genotype frequencies using a k-nearest neighbor approach. Collectively, from sequence context alone, inDelphi predicts the indel lengths of 80-95% of Cas9-mediated editing products and the single-base resolution genotypes of 65-80% of all products (FIG. 13A, FIGS. 19A-19D).

[0324] Trained on data from 1,095 Lib-A sequence contexts in mESCs, inDelphi demonstrates highly accurate genotypic prediction of 1-bp insertions and 1-60-bp deletions at 87-90 VO target sequences previously characterized experimentally in endogenous K562, HCT116, and HEK293 cells (median r=0.87, FIG. 13B). It is noted that the Lib-A versions of these target sites were held out of inDelphi training. The inDelphi model also performs well when predicting indel length distributions from 1-bp insertions to 60-bp deletions at the endogenous VO sites in three human cell lines (median r=0.84, FIG. 13C). Additionally, inDelphi accurately predicts relative frequencies of genotypic outcomes (median r=0.94) and indel length distributions (median r=0.91) of 189 held-out Lib-A targets in mESCs (FIGS. 19A-19D). As a control that the features used in training inDelphi are crucial for its performance, the MH length feature was deleted from the inDelphi MH deletion module and found that inDelphi's performance predicting genotype frequency was reduced to the performance of a model with random weights. A second control in which the deep neural networks were replaced with linear models showed 10-24% reduced performance on the genotype frequency and indel length prediction tasks. Together, these controls indicate that inDelphi's computational structure is important for its accuracy. An online implementation of inDelphi is provided to predict the spectrum of Cas9-mediated products at any target site (crisprindelphi.design). Taken together, these results establish that in data from human and mouse cells, the relative frequencies of most Cas9 nuclease-mediated editing outcomes are highly predictable.

[0325] The ability of Cas9-mediated end-joining repair to induce frameshifts enables efficient gene knockout²⁸. It was reasoned that inDelphi's accurate prediction of the indel length distribution of 80-95% of template-free Cas9-mediated editing products should also enable accurate prediction of Cas9-induced frameshifts. This task was simulated in 86 endogenous VO target sequences in HEK293 by tabulating the observed frequency of indels resulting in +0, +1, and +2 frameshifts. The observed frequency of indels in each frame predicted by inDelphi (median r=0.81) compare favorably to those generated by Microhomology Predictor (median r=0.37), a previously published method²⁹ (FIG. 13D). Thus, it is expected that inDelphi facilitates Cas9-mediated gene knockout approaches by allowing a priori selection of gRNAs that induce high or low knockout frequencies. To this end, an online tool is provided to predict frameshift frequencies for any SpCas9 gRNA targeting the coding human and mouse genome (crisprindelphi.design). It is noted that human exons have a significant tendency (p<10⁻¹⁰⁰, FIGS. 19A-19D) to favor frame-preserving deletion repair compared to shuffled exon sequences or non-coding human DNA. Taken together, the results show that inDelphi provides accurate single-base resolution predictions for the relative frequencies of most Cas9 nuclease-mediated end-joining repair outcomes, including frameshifts.

### Designing High Precision Template Free Cas9 Nuclease-Mediated Editing

[0326] While end-joining repair is highly efficient at inducing mutations after Cas9 treatment, its tendency to induce a heterogeneous mixture of repair genotypes has limited its application primarily to gene disruption and removal of intervening sequences between two double-stranded breaks30-33. Motivated by inDelphi's ability to predict Cas9-mediated repair outcomes from target sequences alone, it was sought to identify target sites for which the repair profile is highly skewed toward a single outcome. In principle, the ability of inDelphi to identify such sites may enable efficient, template-free, nuclease-mediated precision gene editing.

[0327] It was reasoned that a single strong microhomology hybridization possibility with a high phi score would outcompete a background of weaker alternative microhomologies to yield efficient and precise repair to a single deletion genotype. Microduplications, in which a stretch of DNA is repeated in tandem, contain stretches of exact microhomology and thus are predicted by inDelphi to collapse precisely through deletion upon MMEJ repair (FIG. 14A).

[0328] To test this prediction, a second high-throughput Cas9 substrate library (Lib-B—see Table 5) was designed and constructed that contains three families of target sequences with microduplications of each length from 7-25 bp. Cas9-mediated double-strand break repair products were analyzed in Lib-B in mESCs and in human U2OS and HEK293T cells using the same procedure as for Lib-A evaluation. Highly precise repair was consistently observed in which 40-80% of all repair events correspond to a single repair genotype (FIG. 14B), substantially higher than the 21% median frequency of the most abundant deletion genotype in 90 VO sites that were not pre-selected for microhomology. The fraction of microduplication repair to a single collapsed product as compared to other outcomes increased with microduplication length in mESCs, U2OS, and HEK293T cells (r=0.35, p<7×10⁻⁵, FIG. 14B, FIGS. 20A-20E). It is noted that these sites have significantly higher phi scores and precision scores compared to VO sites, and significantly fewer 1-bp insertions (FIGS. 20A-20E). Thus, sites with strong MH deletion candidates are enriched in that specific deletion outcome at the expense of MH-less deletion and 1-bp insertion outcomes.

[0329] It is also hypothesized that sequence contexts with no strong MHs (low total phi scores) could enable precise 1-bp insertion repair. To test this possibility, three target sequence frameworks with low total phi scores were included in Lib-B (FIGS. 20A-20E) containing randomization at the four positions surrounding the Cas9 cleavage site (positions −5 to −2 with respect to the PAM at positions 0-2; see FIG. 12A). Cas9 nuclease treatment of 205 such sequences in Lib-B resulted in highly precise (up to 90% of all repair events) and reproducible (r=0.90 between mESC replicates) 1-bp insertions (FIG. 14C, FIGS. 20A-20E). Strikingly, the efficiency of 1-bp insertions is strongly influenced by the nucleotide identities in positions −5 to −2 (FIG. 14C). Similar to the findings from Lib-A (FIG. 12E, FIGS. 20A-20E), −4T and −3G correlate with higher relative frequencies of 1-bp insertion among all products while −4G correlates with lower frequencies of insertion (FIG. 14D). Among these three fixed sequence contexts in Lib-B with low total MH, 1-bp insertions comprise a median of 29% of all repair products, which is significantly higher than in VO sites (FIGS. 20A-20E). Moreover, a median of 61% of all products are 1-bp insertions at sites with TG at the −4 and −3 positions (FIG. 14D), revealing that precise 1-bp insertion can be obtained through Cas9-mediated end-joining at specific, predictable sequence contexts.

[0330] It is noted that sequences that support higher insertion efficiencies (>50%) have on average 33% lower total efficiencies of Cas9-mediated indels than sequences that yield lower insertion efficiencies (r=−0.35, p=3.3×10⁻⁷, FIGS. 20A-20E), possibly because the lower efficiency of MMEJ at such sites decreases the likelihood of mutagenic repair of the Cas9-induced double-strand break. These observations collectively establish that Cas9-mediated repair of target sites with predictable sequence features can lead to precise editing favoring one particular outcome.

[0331] Based on these findings, inDelphi was used to predict gRNAs that lead to such precise outcomes. A metric was defined using information entropy to measure the precision of a repair outcome spectrum as a score ranging from zero (highest entropy, lowest precision) to one (lowest entropy, highest precision) and demonstrated that inDelphi is capable of predicting the precision of Cas9-induced deletions in 86 VO target sequences in HEK293 cells (median r=0.64, FIG. 14E). inDelphi was then used to discover SpCas9 gRNAs that support precise end-joining repair in the human genome.

[0332] It was found that substantial fractions of all genome-targeting SpCas9 gRNAs are predicted to produce relatively precise outcomes (Table 2). Indeed, inDelphi predicts that 26% of SpCas9 gRNAs that target human exons and introns are “precision gRNAs” (FIG. 14F), which are defined as gRNAs predicted to produce a single genotypic outcome in >30% of all major editing products, with 20% of gRNAs predicted to be produce a single deletion genotype at >30% efficiency and 6.2% predicted to produce a single 1-bp insertion genotype at >30% efficiency. Moreover, inDelphi predicts that 4.8% of SpCas9 gRNAs targeting human exons and introns are “high-precision gRNAs,” which are defined as gRNAs that produce a single genotype in >50% of all major editing products (FIG. 14F, 3.8% producing high-precision deletion, 0.94% producing high-precision 1-bp insertion). These findings suggest that Cas9-mediated end-joining outcomes at many target sites are both predictable and precise, and that precision and high-precision gRNAs offer new opportunities for precision deletion and insertion by Cas9 nuclease-mediated editing. An online tool is provided to predict the precision of a given gRNA and to identify precision and high-precision SpCas9 gRNAs targeting the human and mouse genomes (crisprindelphi.design).

### Efficient Template Free Repair of Pathogenic Alleles to Wild-Type Genotypes

[0333] Next, inDelphi-classified high-precision gRNAs were used to identify new targets for therapeutic genome editing. Starting with 23,018 insertion, short deletion, and microduplication disease genotypes from the ClinVar and HGMD databases^{16,17}, inDelphi was tasked with identifying pathogenic alleles that are suitable for template-free Cas9-mediated editing to effect precise gain-of-function repair of the pathogenic genotype. Two genetic disease allele categories that have not been previously identified as targets for Cas9-mediated repair are predicted by inDelphi to be candidates for high-precision repair. The first category is a selected subset of pathogenic frameshifts in which, because of high-precision repair, inDelphi predicts that 50-90% of Cas9-mediated deletion products will correct the reading frame compared to the average frequency of 34% among all disease-associated frameshift mutations. The second category is pathogenic microduplication alleles in which a short sequence duplication leads to a frameshift or loss-of-function protein sequence changes (FIG. 15A).

[0334] To test the accuracy of inDelphi at predicting repair genotypes of therapeutically relevant alleles, 1,592 pathogenic human loci that inDelphi identified to have the highest predicted rates of frameshift or microduplication repair to the wild-type sequence, were included in Lib-B. Cas9-mediated repair of genome-integrated Lib-B in mESCs and human U2OS and HEK293T cells confirmed highly efficient and precise gain-of-function editing. It was observed that 183 human disease microduplication alleles included in Lib-B were repaired to wild-type in >50% of all products FIG. 15B), and 508 pathogenic human frameshift alleles were restored into proper reading frame in >50% of all products in mESCs (FIG. 15C), in agreement with inDelphi's predictions (r=0.64 for frame restoration, r=0.64 for wildtype repair). Similar results were observed in HEK293T and U2OS cells (FIGS. 21A-21D). While microduplication repair to the wild-type genotype unambiguously restores wild-type protein function, it is noted that frameshift restoration that alters coding sequence requires case-by-case analysis to validate rescue of protein function.

[0335] To determine if the efficiency of microduplication repair can be increased by manipulation of DNA repair pathways, Cas9 cleavage of Lib-B was performed in Prkdc^{-/-}Lig4^{-/-} mESCs³⁴, which are deficient for two proteins involved in NHEJ repair³⁵. As expected, the frequency of MH-less deletion repair in cells with impaired NHEJ is decreased (25% to 16%) (FIGS. 22A-22E). It was also observed that the precision of 1-bp insertions that result in duplication of the −4 nucleotide is increased in Prkdc^{-/-}Lig4^{-/-} mESCs (FIGS. 22A-22E). Importantly, the frequency of MH-dependent deletion repair is substantially increased (58% to 72%) in Prkdc^{-/-}Lig4^{-/-} mESCs, enabling a subset of pathogenic alleles to be repaired to wild-type with strikingly high precision. In wild-type mESCs, 183 pathogenic alleles are repaired to wild-type in >50% of all edited products and 11 pathogenic alleles are repaired to wild-type in >70% of all edited products, while in Prkdc^{-/-}Lig4^{-/-} mESCs, 286 pathogenic alleles are repaired to wildtype in >50% of all edited products and 153 pathogenic alleles are repaired to wild-type in >70% of products (FIG. 15D, Table 6). Thus, impairing NHEJ can further increase the precise repair of pathogenic microduplications to wild-type (p=7.8*10⁻¹², FIG. 15D). These data support the model that competing end-joining repair mechanisms determine the relative frequencies of specific editing outcome types and demonstrate that template-free genotypic correction of hundreds of pathogenic microduplication alleles in genes such as PKD1 (corrected in 92% of edited Prkdc^{-/-}Lig4^{-/-} mESC alleles), GJB2 (91%), MSH2 (88%), LDLR (87%), and BRCA1 (82%) can be optimized to occur with strikingly high efficiency by manipulation of repair pathways.

[0336] inDelphi's prediction of highly efficient wild-type repair was further tested on pathogenic LDLR microduplication alleles, which cause dominantly inherited familial hypercholesterolemia³⁶. Five pathogenic LDLR microduplication alleles were separately introduced within a full-length LDLR coding sequence upstream of a P2A-GFP cassette into the genome of human and mouse cells, such that Cas9-mediated repair to the wild-type LDLR sequence should induce phenotypic gain of LDL uptake and restore the reading frame of GFP. Cas9 and a gRNA that is specific to each pathogenic allele and does not target the wild-type repaired sequence were then delivered. Robust restoration of LDL uptake was observed as well as restoration of GFP fluorescence in mESCs, U2OS cells, and HCT116 cells in up to 79% of cells following transfection with Cas9 and inDelphi gRNAs (FIGS. 15E, 15F, FIGS. 23A-23E). HTS confirms efficient genotypic repair to wild-type of these five LDLR microduplication alleles in human and mouse cells as well as of three other pathogenic microduplication alleles in the GAA, GLB1, and PORCN genes introduced to cells using the same method (Table 1, Table 3). Importantly, in these experiments, high-frequency LDLR phenotypic correction was observed when cutting with either SpCas9 or Streptococcus aureus Cas9 (SaCas9)³⁷ (Table 3), suggesting that microduplication repair is a feature of cellular repair after a Cas9-mediated double-strand break that does not require a specific nuclease.

[0337] Finally, precise template-free Cas9-mediated MMEJ was used to repair an endogenous pathogenic 16-bp microduplication in primary fibroblasts from a Hermansky-Pudlak syndrome (HPS1) patient. HPS1 causes blood clotting deficiency and albinism in patients and is particularly common in Puerto Ricans³⁸. Simultaneous delivery of Cas9 and gRNA specific to the pathogenic microduplication allele induced high-efficiency correction to the wild-type sequence (mean frequency=71% of edited alleles, N=3, Table 1). These findings suggest the potential of template-free, precise Cas9 nuclease-mediated repair of microduplication alleles to achieve efficient repair to the wild-type sequence for therapeutic gain-of-function genome editing.

[0338] The following tables are referenced in this specification.

TABLE 1
Repair of microduplication pathogenic alleles through template-free Cas9-
nuclease treatment.

| | | Predicted frequency | Observed frequency | Observed frequency |
|---|---|---|---|---|
| | | of repair to wild- | of repair to wild-type | of repair to wild-type |
| Pathogenic | | type genotype in all | genotype in all | genotype in all edited |
| microduplication | | major editing | edited products in | outcomes in |
| genotype | Cell type | products (%) | Lib-B, mESCs (%) | endogenous data (%) |
| HPS1:c.1472_1487 | Primary | 88 | 53 | 71 |
| dup16 | patient | | | |
| | fibrobtasts | | | |
| LDLR:c.1662_1689 | mESCs | 85 | 61 | 65 |
| dupGCTGGTGA | | | | |
| LDLR:c.1662_1669 | HCT116 | 85 | 61 | 89 |
| dupGCTGGTGA | | | | |
| LDLR:c.1662_1669 | USOS | 85 | 51 | 77 |
| dupGCTGGTGA | | | | |

TABLE 2
Frequency of gRNAs in the human genome with
denoted Cas9-mediated outcome precision.

| | Fraction of 1,003,524 SpCas9 gRNAs in | | |
|---|---|---|---|
| | human exons and introns for which the | | |
| | most-common repair genotype comprises >XX % | | |
| | of all major editing products | | |
| Precision gRNA | Precise product | Precise product | Any precise |
| frequency | is a deletion | is a 1-bp insertion | product |
| (%) | (% of gRNAs) | (% of gRNAs) | of gRNAs) |
| 10 | 86 | 35 | 96 |
| 15 | 63 | 23 | 78 |
| 30 | 43 | 14 | 55 |
| 35 | 29 | 10 | 39 |
| 30 | 20 | 6.2 | 26 |
| 35 | 13 | 4.1 | 17 |
| 40 | 8.6 | 2.6 | 11 |
| 45 | 5.8 | 1.3 | 7.1 |
| 50 | 3.8 | 0.94 | 4.8 |
| 55 | 2.4 | 0.52 | 3.0 |
| 60 | 1.5 | 0.39 | 1.9 |
| 65 | 0.98 | 0.086 | 1.1 |
| 70 | 0.58 | 0.026 | 0.61 |
| 75 | 0.29 | 0.024 | 0.32 |
| 80 | 0.12 | 0 | 0.12 |
| 85 | 0.040 | 0 | 0.040 |
| 90 | 0.0049 | 0 | 0.0049 |

TABLE 3
Repair of eight pathogenic microduplication alleles in individual cellular
experiments.

| Pathogenic allele | LDLRdup1 | LDLRdup2 | LDLRdup2 | LDLRdup3 | LDLRdup4 | LDLRdup5 | PORCNdup | GAAdup | GDDdup | GLB1dup | HPS1dup | ATP7Adup |
|---|---|---|---|---|---|---|---|---|---|---|---|---|
| #AlleleID | 245617 | 245706 | 246706 | 245709 | 245715 | 246266 | 25739 | 354180 | 254180 | 98805 | ND | ND |
| Predicated frequency of | 79 | 98 | 96 | 95 | 86 | 94 | 90 | 76 | 93 | 95 | ND | ND |
| deletions restoring frame (%) | | | | | | | | | | | | |
| Flow cytometric frameshift | 57 | 95 | 57 | 90 | 72 | 87 | ND | 79 | 74 | 85 | ND | ND |
| frequency (%) | | | | | | | | | | | | |
| Predicated frequency of | 72 | 90 | 83 | 94 | 85 | 86 | 89 | 74 | 91 | 79 | 88 | 43 |
| repair to wild-tyoe | | | | | | | | | | | | |
| genotype among all major | | | | | | | | | | | | |
| editing products (%) | | | | | | | | | | | | |
| Flow cytometric | 36 | 69 | 30 | 53 | 33 | 78 | ND | ND | ND | ND | ND | ND |
| phenotype repair | | | | | | | | | | | | |
| frequency, mESC (%) | | | | | | | | | | | | |
| Observed frequency of | ND | 67 | 39 | 25 | 15 | 65 | 48 | 76 | 59 | 42 | ND | ND |
| repair to wild-type | | | | | | | | | | | | |
| genotype among all edited | | | | | | | | | | | | |
| products in HTS, mESC (%) | | | | | | | | | | | | |
| Observed frequency of | 100 | [symbol] | ND | ND | ND | 77 | ND | ND | ND | ND | ND | ND |
| repair to wild-type | | | | | | | | | | | | |
| genotype among all edited | | | | | | | | | | | | |
| products in HTS, U2OS (%) | | | | | | | | | | | | |
| Observed frequency of | ND | ND | ND | 24 | ND | 89 | ND | ND | ND | ND | ND | ND |
| repair to wild-type | | | | | | | | | | | | |
| genotype among all edited | | | | | | | | | | | | |
| products in HTS, HCT116 (%) | | | | | | | | | | | | |
| Observed frequency of | ND | ND | ND | ND | ND | 58 | 42 | ND | 63 | 41 | ND | ND |
| repair to wild-type | | | | | | | | | | | | |
| genotype among all edited | | | | | | | | | | | | |
| products in Lib-B, mESCs (%) | | | | | | | | | | | | |
| Observed frequency of | ND | ND | ND | ND | ND | ND | ND | ND | ND | ND | [symbol] | [symbol] |
| repair to wild-type genotype | | | | | | | | | | | | |
| among all edited products in | | | | | | | | | | | | |
| primary patient fibroblasts (%) | | | | | | | | | | | | |
| gRNA sequence | TGC | [symbol] [symbol] AAG | TCC [symbol] [symbol] | CTGCA | TTTCC | ACATC | CT [symbol] [symbol] [symbol] | AGC [symbol] [symbol] | CTG [symbol] [symbol] | T [symbol] T [symbol] A | CAGCA | TTTTT |
| | AGA [symbol] [symbol] | GAC [symbol] [symbol] | GTC [symbol] [symbol] | AG [symbol] [symbol] [symbol] | TCG [symbol] [symbol] | TAC [symbol] [symbol] | CCT [symbol] [symbol] | CAGAA | CAAGG | ACTAT | GGCCA | CCATA |
| | [symbol] CTCC | AT [symbol] [symbol] [symbol] | A [symbol] [symbol] [symbol] [symbol] | AAT [symbol] [symbol] | AGA [symbol] [symbol] | GCT [symbol] [symbol] | [symbol] TTTT | [symbol] [symbol] TGA | [symbol] [symbol] ACT | [symbol] [symbol] [symbol] GT | GG [symbol] [symbol] [symbol] | TAAGA |
| | GAG [symbol] [symbol] | ACA [symbol] [symbol] | TCCTG | TGA [symbol] [symbol] | TGT [symbol] [symbol] | TGA [symbol] [symbol] | ATCCC | CT [symbol] [symbol] [symbol] | GCA [symbol] [symbol] | ATATA | CC [symbol] [symbol] [symbol] | TAGA [symbol] [symbol] |
| Cas9 Type | KKH | KKH | KKH | KKH | KKH | SaCas9 | SaCas9 | KKH | | | | |
| | SaCas9 | SaCas9 | SaCas9 | SaCas9 | SaCas9 | | | SaCas9 | SaCas9 | SaCas9 | SaCas9 | SaCas9 |

ND, not determined
LDLRdup1, LDLR:c.669_533dupGGCTCGGA. LDLRdup2, LDLR:c.668_681dupAGGACAAATCTGAC. (SEQ ID NO: 1)
LDLRdup3, LDLR:c.669_680dupGGACAAATCTGA. LDLRdup4, LDLR:c.672_683dupCAAATCTGACGA. LDLRdup5, LDLR:c.1662_1669dupGCTGGTGA.(SEQ ID NOs: 2 and 3)
PORCNdup, PORCN:c.1059_1071dupCCTGGCTTTTATC. GAAdup:c.2704_2716dupCAGAAGGTGACTG. (SEQ ID NOs: 4 and 5)
GLB1dup:c.1456_1466dupGGTGCATATAT (SEQ ID NO: 6) [symbol]
indicates data missing or illegible when filed

[0339] Table 4: Lib-A sequences (presented below between the end of this specification and Table 5).

[0340] Table 5: Lib-B sequences (presented below between Table 4 and Table 6).

[0341] Table 6: inDelphi predictions and observed results. Table 6 comprises Table 6A: inDelphi predictions and observed results for Lib-B, showing all sequences with replicate-consistent mESC results; Table 6B (continued from 6A); Table 6C (continued from 6B); Table 6D (continued from 6C); and Table 6E (continued from 6D) (presented below between Table 5 and the claims).

TABLE 7
Frequency of gRNAs in the human genome with denoted Cas9-mediated outcome precision

| | inDelphi trained on Lib-A data | | | InDelphi trained on Lib-A data | | |
|---|---|---|---|---|---|---|
| | from mESCs for 1-bp ins. module | | | from U2OS cells for 1-bp ins. module | | |
| Precision-X | Precise product | Precise product | Total % of | Precise product | Precise product | Total % of |
| threshold | is a deletion | is a 1-bp insertion | gRNAs that | is a deletion | is a 1-bp insertion | gRNAs that |
| (%) | (% of gRNAs) | (% of gRNAs) | are precise-X | (% of gRNAs) | (% of gRNAs) | are precise-X |
| 10 | 82 | 38 | 93 | 70 | 78 | 97 |
| 15 | 61 | 23 | 75 | 44 | 64 | 87 |
| 20 | 43 | 15 | 55 | 27 | 53 | 72 |
| 25 | 30 | 10 | 39 | 17 | 44 | 58 |
| 30 | 21 | 6.6 | 28 | 11 | 36 | 46 |
| 35 | 15 | 4.4 | 19 | 6.9 | 28 | 34 |
| 40 | 10 | 2.9 | 13 | 4.1 | 21 | 25 |
| 45 | 6.5 | 1.9 | 6.4 | 2.4 | 15 | 18 |
| 50 | 4.3 | 1.3 | 5.6 | 1.4 | 10 | 12 |
| 55 | 2.8 | 0.8 | 3.6 | 0.6 | 6.7 | 7.5 |
| 60 | 1.8 | 0.5 | 2.3 | 0.5 | 4.0 | 4.4 |
| 65 | 1.1 | 0.3 | 1.5 | 0.2 | 2.2 | 2.4 |
| 70 | 0.7 | 0.2 | 0.9 | 0.1 | 1.1 | 1.2 |
| 75 | 0.4 | 0.1 | 0.5 | 0.04 | 0.5 | 0.5 |
| 80 | 0.2 | 0.06 | 0.3 | 0.01 | 0.2 | 0.2 |
| 85 | 0.06 | 0.04 | 0.1 | 0.003 | 0.07 | 0.06 |
| 90 | 0.03 | 0.02 | 0.05 | 0.0007 | 0.03 | 0.03 |

TABLE 8
Endogenous repair of 24 designed high-
precision gRNAs in human cell lines

| | Observed frequency among all edited products | | | |
|---|---|---|---|---|
| | from deep sequencing at endogenous loci (%) | | | |
| Gene, | | Most | | Most |
| exon/chr, | | frequent | | frequent |
| outsite | Frameshift, | genotype, | Frameshift | genotype, |
| (hg19) | U2OS | U2OS | HEK293T | HEK293T |
| VEGFA | 91, 67 | 36, 34* | 90, 90 | 43, 40* |
| exon1: 456 | | | | |
| VEGFR2 | 91, 91 | 50, 53* | 91, 91 | 50, 24* |
| exon5: 2 | | | | |
| PDCD1 | 90, 90 | 20, 21* | 91, 90 | 29, 13* |
| exon5: 208 | | | | |
| APOB | 83, 83 | 22, 21* | 87, 85 | 35, 18* |
| exon25: 147 | | | | |
| VEGFA | 85, 89 | 27, 29* | 93, 91 | 55, 32* |
| exon3: 127 | | | | |
| CCR5 | 82, 81 | 20, 21* | 86, 84 | 43, 27* |
| exon1: 1941 | | | | |
| CD274 | 85, 86 | 9, 10* | 84, 82 | 31, 14* |
| exon2: 271 | | | | |
| APOB | 91, 89 | 26, 25* | 88 | 37* |
| exon26: 5590 | | | | |
| VEGFR2 | 82, 82 | 35, 33* | 82, 82 | 40, 24* |
| exon26: 19 | | | | |
| CXCR4 | 86, 86 | 32, 33* | 91 | 54* |
| exon1: 825 | | | | |
| PCSK9 | 81, 78 | 28, 25^{†} | 78 | 27^{†} |
| exon11: 15 | | | | |
| CCR5 | 84, 85 | 55, 52^{†} | 67 | 46^{†} |
| exon1: 885 | | | | |
| CCR5 | 92, 94 | 61, 60^{†} | 91, 92 | 49, 58^{†} |
| exon1: 1027 | | | | |
| APOB | 93, 93 | 75, 74^{†} | 93, 95 | 69, 81^{†} |
| exon26: 5573 | | | | |
| CCR5 | 94, 94 | 37, 25^{†} | 83, 89 | 29, 38^{†} |
| exon1: 61 | | | | |
| CCR5 | 61, 61 | 28, 29^{†} | 80, 83 | 29, 43^{†} |
| exon1:1577 | | | | |
| APOB | 89, 89 | 25, 27^{†} | 91, 89 | 23, 38^{†} |
| exon22: 100 | | | | |
| APOBEC3B | 83, 84 | 50, 52^{†} | 75, 88 | 51, 60^{†} |
| exon3: 202 | | | | |
| MACCHC | 97, 95 | 80, 77^{†‡} | 97, 98 | 78, 85^{†‡} |
| chr1: 45973892 | | | | |
| PROK2 | 93, 94 | 44, 41^{†‡} | 93, 93 | 45, 53^{†‡} |
| chr3: 71821967 | | | | |
| IDS | 95, 95 | 72, 74^{†‡} | 93, 95 | 64, 80^{†‡} |
| chrX: 148564700 | | | | |
| ECM1 | 87, 89 | 44, 47^{†‡} | 89, 89 | 32, 35^{†‡} |
| chr1: 150484936 | | | | |
| KCNH2 | 40 | 25^{†‡} | 65, 85 | 35, 14^{†‡} |
| chr7: 150644566 | | | | |
| LDLR | 90, 91 | 76, 77^{†‡} | 90, 96 | 77, 83^{†‡} |
| chr19: 11222303 | | | | |

### DISCUSSION

[0342] The Cas9-mediated end-joining repair products of thousands of target DNA loci integrated into mammalian cells were used to train a machine learning model, inDelphi, that accurately predicts the spectrum of genotypic products resulting from double-strand break repair at a target DNA site of interest. The ability to predict Cas9-mediated products enables new precision genome editing research applications and facilitates existing applications.

[0343] The inDelphi model identifies target loci in which a substantial fraction of all repair products consists of a single genotype. The findings suggest that 26% of SpCas9 gRNAs targeting the human genome are precision gRNAs, yielding a single genotypic outcome in >30% of all major repair products, and 5% are high-precision gRNAs in which >50% of all major repair products are of a single genotype. Such precision and high-precision gRNAs enable uses of Cas9 nuclease in which the major genotypic products can be predicted a priori. Indeed, it was experimentally shown that high-precision, template-free Cas9-mediated editing can mediate efficient gain-of-function repair at hundreds of pathogenic alleles including microduplications (FIGS. 15B, 15E, 15F) in cell lines and in patient-derived primary cells (Table 1).

[0344] Moreover, evidence is presented that manipulation of available DNA repair pathways can further increase the precision of template-free repair outcomes. Suppressing NHEJ augments repair of pathogenic microduplication alleles, suggesting that temporary manipulation of DNA repair pathways could be combined with Cas9-mediated editing to favor specific editing genotypes with high precision. Genome editing currently lacks flexible strategies to correct indels in post-mitotic cells because of the limited efficiency of HDR in non-dividing cells³⁹. As MMEJ is thought to occur throughout the cell cycle, inDelphi may provide access to predictable and precise post-mitotic genome editing in a wider range of cell states. It is also anticipated that, given appropriate training data, inDelphi will also be able to accurately predict repair genotypes from other double-strand break creation methods, including other Cas9 homologs, Cpf1, transcription activator-like effector nucleases (TALENs), and zinc-finger nucleases (ZFNs)^{37,41-43}. This work establishes that the prediction and judicious application of template-free Cas9 nuclease-mediated genome editing offers new capabilities for the study and potential treatment of genetic diseases.

Cellular Repair of Double-Stranded DNA Breaks and inDelphi

[0345] DNA double-strand breaks are detrimental to genomic stability, and as such the detection and faithful repair of genomic lesions is crucial to cellular integrity. A large number of genes have evolved to respond to and repair DNA double-strand breaks, and these genes can be broadly grouped into a set of DNA repair pathways²⁶, each of which differs in the biochemical steps it takes to repair DNA double-strand breaks. Accordingly, these pathways tend to produce characteristically distinguishable non-wildtype genotypic outcomes.

[0346] The goal of the machine learning algorithm, inDelphi, is to accurately predict the identities and relative frequencies of non-wildtype genotypic outcomes produced following a CRISPR/Cas9-mediated DNA double-strand break. To accomplish this goal, parameters were developed to classify three distinct categories of genotypic outcomes, microhomology deletions, microhomology-less deletions, and insertions, informed by the biochemical mechanisms underlying the DNA repair pathways that typically give rise to them.

[0347] Double strand breaks are thought to be repaired via four major pathways: classical non-homologous end-joining (c-NHEJ), alternative-NHEJ (alt-NHEJ), microhomology-mediated end-joining (MMEJ), and homology-directed repair (HDR)1. To create inDelphi, three machine learning modules were developed to model genotypic outcomes assuming characteristic of the c-NHEJ, microhomology mediated alt-NHEJ, and MMEJ pathways. While template-free CRISPR/Cas9 DNA double-strand break may lead to HDR repair via endogenous homology templates that exist in trans⁴⁵, HDR-characteristic outcomes are not explicitly modeled using the algorithm.

[0348] Before proceeding, it is important to note that while specific DNA repair pathways are characteristically associated with distinct genotypic outcomes, the proteins involved in the various pathways and the resulting repair products may at times overlap. This fact has several implications. First, conclusive statements cannot be made about the role of specific proteins or pathways in specific genotypic outcomes without perturbation experiments (e.g. the comparison of wildtype and Prkdc^{-/-}Lig4^{-/-} mESCs can illuminate the roles of these proteins, specifically). Second, because assigning genotypic outcomes to biochemical mechanisms is likely imperfect, machine learning methods were used to identify trends and patterns in genotype frequencies that refine this crude binning process.

[0349] In the first step of the inDelphi method, genotypic outcomes were separated into three classes: microhomology deletions (MH deletions), microhomology-less deletions (MH-less deletions), and single-base insertions (1-bp insertions) (FIG. 12A). Below the algorithmic definitions of each genotypic outcome class are outlined, the pathways associated with each class, and the DNA sequence parameters included in inDelphi training of each class. For more detailed technical algorithmic definitions of the genotypic outcome classes.

MH Deletions are Predicted from MH Length, MH GC Content, and Deletion Length

[0350] The majority of Cas9-mediated double-strand break repair genotypes observed in the datasets are what are classified as MH deletions (53-58% in mESC, K562, HCT116, and HEK293). It is hypothesized that these deletions occur through MMEJ-like processes and use known features of this pathways to inform a machine learning module to predict MH deletion outcomes. Following 5′-end resection as occurs in MMEJ, alt-NHEJ, and HDR²⁶, microhomologous basepairing of single-stranded DNA (ssDNA) sequences occurs across the border of the double strand breakpoint^{46, 47}. To restore a contiguous double-strand DNA chain, the 5′-overhangs not participating in the microhomology are removed up until the paired microhomology region, and the unpaired ssDNA sequences are extended by DNA polymerase using the opposing strand as a template (FIG. 12B, FIGS. 18A-18H).

[0351] Assuming these same processes, inDelphi calculates the set of all MH deletions available given a specific sequence context and cleavage site.

[0352] As an example workflow, given the following sequence and its cleavage site:

ACGTG|CATGA
TGCAC|GTACT

for every possible deletion length from 1-bp to 60-bp deletions, the 3′-overhang is overlapped downstream of the cut site under the upstream 3′-overhang and it is determined if there is any microhomologous basepairing. As an example, given the 4-bp deletion length:

```
ACGTG
  | ||
  GTACT
```

it is seen that there are three microhomologous basepairing events.

[0353] Then a particular microhomology is chosen (here, the italicized C:G):

[symbol]

GTG
| ||
G

[symbol]

then generate its unique repair genotype by following left-to-right along the top strand and jumping down to the complement of the bottom strand to simulate DNA polymerase fill-in.
Here, this yields:

ACATGA
TGTACT

[0354] This can also be displayed as an alignment. It is noted that by “jumping down” after the first base in the top strand, this outcome can also be described using the delta-position 1. (See section on delta-positions). A deletion at delta-position 0 yields the same genotype.

| | |
|---|---|
| Deletion b: | ACGTG----A |
| Wt: | ACGTGCATGA (SEQ ID NO: 7) |

[0355] Thus, there may be multiple MH deletion outcome genotypes for a given deletion length, and there is always a 1:1 mapping between the microhomologous basepairing used in that MH deletion and the resultant genotypic outcome. The set of MH deletions thus includes all 1-bp to 60-bp deletions that can be derived from the steps above that simulate the MMEJ mechanism.

[0356] MMEJ efficiency has been reported to depend on the thermodynamic favorability and stability of a candidate microhomology^{46, 47}. To parameterize MH deletions using the biochemical sequence features that influence this form of DNA repair, inDelphi calculates the MH length, MH GC content, and resulting deletion length for each possible MH deletion. These features are input into a machine learning module as the microhomology neural network (MH-NN) to learn the relationship between these features and the frequency of an MH deletion outcome in a training CRISPR/Cas9 genotypic outcome dataset. While it was predicted and empirically found that favored MH deletions have long MH lengths relative to total deletion length and high MH GC-contents, any explicit direction or comparative weighting to these parameters are not provided at the outset. inDelphi then outputs a phi-score for any MH deletion genotype (whether it was in the training data or not) that represents the favorability of that outcome as predicted by MH-NN.

[0357] It is important to emphasize that the phi-score of a particular MH deletion does not itself represent the likelihood of that MH deletion occurring in the context of all MH deletions at a given site. Some CRISPR/Cas9 target sites may have many possible favorable MH deletion outcomes while other sites have few, and thus phi-score must be normalized for a given target site to generate the fractional likelihood of that genotypic outcome at that site. Total unnormalized MH deletion phi-score is one factor that is further used to predict the relative frequency of the different repair classes: MH deletions, MH-less deletions, and insertions.

MH-Less Deletions are Predicted from their Length

[0358] MH-less deletions are defined as all possible deletions that have not been accounted for by the workflow described above for MH deletions. Mechanistically, the data analysis suggests that MH deletions are associated with repair genotypes produced by c-NHEJ and microhomology-mediated alt-NHEJ pathways.

[0359] Following a double-strand break, c-NHEJ-associated proteins rapidly bind the DNA strands flanking the double-strand DNA breakpoint and recruit ligases, exonucleases, and polymerases to process and re-anneal the breakpoint in the absence of 5′-end resection (FIGS. 18A-18H)^{26, 35}. Commonly, c-NHEJ repair is error-free; however, in the context of Cas9-mediated cutting, faithful repair leads to repeated cutting, thereby increasing the eventual likelihood of mutagenic repair. Erroneous c-NHEJ repair products are mainly thought to consist of small insertions or deletions or combinations thereof that most frequently occur in the direct vicinity of the DNA break point^{35, 48, 49}. The resulting deletions, which are referred to as medial end-joining MH-less deletions, have often lost bases both upstream and downstream of the cleavage site.

[0360] Microhomology-mediated alt-NHEJ is a distinct pathway that produces MH-less deletion products. In contrast to c-NHEJ, which is microhomology independent, this form of alt-NHEJ repair occurs following 5′-end resection and is mediated by microhomology in the sequence surrounding the double-strand break-point1. Microhomologous basepairing stabilizes the 3′-ssDNA overhangs following 5′-end resection, similarly to in MMEJ, allowing DNA ligases to join the break across one of the strands of this temporarily configured complex. The opposing un-annealed flap is then removed, and newly synthesized DNA templated off of the remaining strand is annealed to repair the lesion (FIGS. 18A-18H).

[0361] While alt-NHEJ uses microhomology, the repair products it produces do not follow the predictable genotypic patterns induced by MMEJ and are thus grouped into MH-less deletion genotypes. MH deletions are a direct merger of both annealed strands, in which the outcome genotype switches from top to bottom strand at the exact end-point of a microhomology. In contrast, while alt-NHEJ employs microhomology in its repair mechanism, the deletion outcomes it generates comprise bases exclusively derived from either the top or bottom strand. Mechanistically, this occurs because ligation of a 3′-overhang to its downstream ligation partner results in removal of the entire opposing ssDNA overhang up until the point of ligation. This process prevents any deletion from occurring in the 3′-overhang strand that is first attached to the DNA backbone, while inducing loss of an indeterminant length of sequence on the opposing strand. The resulting deletion genotypes, which are referred to as unilateral end-joining MH-less deletions, do not retain information on the exact microhomology causal to their occurrence, and are thus also referred to as MH-less.

[0362] Consequently, the various mechanisms that give rise to MH-less deletions are capable of generating a vast number of genotypic outcomes for any given deletion length. Having less information on the biochemical mechanisms that impact the relative frequency of NHEJ deletion products, inDelphi models these deletions without assuming any particular mechanism.

[0363] inDelphi detects MH-less deletions from training data as the set of all deletions that are not MH deletions and parameterizes them solely by the length of the resulting deletion. This is based on the simple assumption that c-NHEJ and alt-NHEJ processes are most likely to produce short deletions, supported by the empirical observation. As with MH deletions, this assumption is not explicitly coded into the inDelphi MH-less deletion prediction module, instead allowing it to be “learned” by a neural network called MHless-NN.

[0364] MHless-NN optimizes a phi-score for a given MH-less deletion length, grounded in the frequency of MH-less deletion outcomes of that length observed in the training data. It was observed that MHless-NN learns a near-exponential decaying phi-score for increasing deletion length, that reflects the sum total frequency of all MH-less deletion genotypes. The total unnormalized MH-less deletion phi-score for a given target and cut site is also employed to inform the relative frequency of different repair classes.

1-Bp Insertions are Predicted from Sequence Context and Deletion Phi-Scores

[0365] Lastly, inDelphi predicts 1-bp insertions from both the broader sequence context and the immediate vicinity of the cleavage site. It was empirically found that 1-bp insertions are far more common than longer insertions, so the focus is on their prediction. It is classically assumed that short sequence insertions are the result of c-NHEJ^{48, 49}, however, little else is known about their biochemical mechanism as it pertains to local sequence context to help inform prediction. Nonetheless, powerful correlations were found between the identities of the bases surrounding the Cas9 cleavage site and the frequency and identity of the inserted base (see main text). Motivated by these empirical observations, inDelphi is fed with training data on 1-bp insertion frequencies and identities at each training site parameterized with the identities of the −3, −4, and −5 bases upstream of the NGG PAM-sequence (when the training set is sufficiently large, and the −4 base alone when training data is limited) as features. Also added as features are the precision score of the deletion length distribution and the total deletion phi-score at that site. These features are combined into a k-nearest neighbor algorithm that predicts the relative frequencies and identities of 1-bp insertion products at any target site.

### The Combination of the MH, MH-Less, and Insertion Model Predict Genotype Fractions

[0366] Altogether, informed by known paradigms of DNA repair, 2 neural networks and a k-nearest neighbor model were built to predict genotypic outcomes following Cas9 cutting. These models compete and collaborate in inDelphi to generate predictions of the relative frequencies of these products. This competition within inDelphi among repair types reflects empirical evidence from Lib-A and Lib-B that sequence contexts do influence classes of repair outcomes. Sequence contexts with high phi scores (high microhomology) have higher efficiencies of MH deletions among all editing outcomes (FIG. 14B, FIGS. 20A-20E), and sequence contexts with low phi scores (low microhomology) have higher efficiencies of 1-bp insertions among all editing outcomes (FIGS. 14C, 14D, FIGS. 18A-18H,FIGS. 20A-20E). While it is tempting to generalize that the competition and collaboration among outcome classes modeled by inDelphi reflects interactions among components of distinct DNA repair pathways, the classes of outcomes considered by inDelphi do not necessarily arise from distinct DNA repair pathways as they are described above. inDelphi is trained on the repair outcomes only and cannot distinguish between the nature of genotypes when they may occur through MH-mediated and MH-less mechanisms, and it is imaginable that some repair products result through more than one repair pathway.

[0367] As an additional note, while NHEJ is generally assumed to dominate double-strand break repair from environmentally induced damage³⁵, it was found in the context of Cas9 cutting that MH deletion genotypes are more common than MH-less deletions and insertions. It is possible that error-free c-NHEJ is occurring frequently in response to Cas9 cutting but that its perfect repair allows for recurring Cas9 cutting that goes undetected by the workflow, thus skewing the observed relative frequency profile of mutagenic outcomes toward MMEJ-type repair.

Prkdc^{-/-}Lig4^{-/-} Mutants have Distinct and Predictable DNA Repair Product Distributions

[0368] While it is generally true that the work cannot establish roles for specific DNA repair pathways in specific types of Cas9-mediated outcomes, an experiment has been performed in which Cas9-mediated genotypic outcomes were measured from mESCs that are lacking Prkdc and Lig4, two proteins known to be key in c-NHEJ5. An increase in relative frequency of MH deletions was found as compared to MH-less deletions in Prkdc^{-/-}Lig4^{-/-} mESCs as compared to wild-type mESCs (see main text), which is suggestive of an increase in MMEJ outcomes at the expense of NHEJ outcomes.

[0369] Intriguingly, it was also found that Prkdc^{-/-}Lig4^{-/-} mESCs are impaired in unilateral deletions, where only bases from one side of the cutsite are removed, but not medial MH-less deletion outcomes that have loss of bases on both sides of the breakpoint. (FIGS. 22A-22E). As discussed earlier, microhomology-mediated alt-NHEJ, which it was hypothesized may give rise to unilateral MH-less deletions, proceeds through a mechanism in which DNA repair intermediates that mimic MMEJ-mediated repair are formed initially (FIGS. 18A-18H), as microhomology basepairing temporarily stabilizes 3′-overhangs following 5′-end resection. Subsequently, ligation joins one 3′ overhang with the sequence on the other side of the DNA double-strand break, giving rise to a unilateral deletion. If the unilateral joining products observed in the experiments indeed arise through similar mechanisms as those described by this form of alt-NHEJ, it is conceivable that the MMEJ pathway may overtake 3′-end ligation at this microhomology-containing intermediate step when ligation is impaired through loss of Lig4. Thus, cross-talk of microhomology-mediated repair pathways could account for loss of unilateral end-joining MH-less outcomes and concomitant increase in MH deletion outcomes. Medial joining outcomes are not hypothesized to originate from intermediates that overlap with microhomology-mediated deletion products (FIGS. 18A-18H). Therefore, the repair genotypes generated via this orthogonal pathway may be afforded more time to be completed by ligases other than Lig4, thus explaining why these outcomes appear unaffected by NHEJ impairment.

[0370] While DNA repair products in Prkdc^{-/-}Lig4^{-/-} mESCs differ substantially from those in wild-type cells, it was found that these DNA repair products are also highly predictable. In particular, inDelphi performed well on held-out Prkdc^{-/-}Lig4^{-/-} data when trained on Prkdc^{-/-}Lig4^{-/-} data (indel genotype prediction median Pearson correlation=0.84, indel length frequency prediction Pearson correlation=0.80), showing that the modeling approach is robustly capable of learning accurate predictions for Cas9 editing data in not just wild-type experimental settings but also settings with significant biochemical perturbation. As such, it is suggested here that inDelphi's modeling approach can be useful on additional tasks unexplored here provided that inDelphi is supplied with appropriate training data.

### Methods

### Library Cloning.

[0371] Specified pools of 2000 oligos were synthesized by Twist Bioscience and amplified with NEBNext polymerase (New England Biolabs) using primers OligoLib_Fw and OligoLib_Rv (see below), to extend the sequences with overhangs complementary to the donor template used for circular assembly. To avoid over-amplification in the library cloning process, qPCR was first performed by addition of SybrGreen Dye (Thermo Fisher) to determine the number of cycles required to complete the exponential phase of amplification. The PCR reaction was run for half of the determined number of cycles at this stage. Extension time for all PCR reactions was extended to 1 minute per cycle to prevent skewing towards GC-rich sequences. The 246-bp fragment was purified using a PCR purification kit (Qiagen).

[0372] Separately, the donor template for circular assembly was amplified with NEBNext polymerase (New England Biolabs) for 20 cycles from an SpCas9 sgRNA expression plasmid (Addgene 71485)³⁴ using primers CircDonor_Fw and CircDonor_Rv (see below) to amplify the sgRNA hairpin and terminator, and extended further with a linker region meant to separate the gRNA expression cassette from the target sequence in the final library. The 146-bp amplicon was gel-purified (Qiagen) from a 2.5% agarose gel.

[0373] The amplified synthetic library and donor templates were ligated by Gibson Assembly (New England Biolabs) in a 1:3 molar ratio for 1 hour at 50° C., and unligated fragments were digested with Plasmid Safe ATP-Dependent DNase (Lucigen) for 1 hour at 37° C. Assembled circularized sequences were purified using a PCR purification kit (Qiagen), linearized by digestion with SspI for ≥3 hours at 37° C., and the 237-bp product was gel purified (Qiagen) from a 2.5% agarose gel.

[0374] The linearized fragment was further amplified with NEBNext polymerase (New England Biolabs) using primers PlasmidIns_Fw and PlasmidIns_Rv (see below) for the addition of overhangs complementary to the 5′- and 3′-regions of a Tol2-transposon containing gRNA expression plasmid (Addgene 71485)³⁴ previously digested with BbsI and XbaI (New England Biolabs), to facilitate gRNA expression and integration of the library into the genome of mammalian cells. To avoid over-amplification, qPCR was performed by addition of SybrGreen Dye (Thermo Fisher) to determine the number of cycles required to complete the exponential phase of amplification, and then ran the PCR reaction for the determined number of cycles. The 375-bp amplicon was gel-purified (Qiagen) from a 2.5% agarose gel.

[0375] The 375-bp amplicon and double-digested Tol2-transposon containing gRNA expression plasmid were ligated by Gibson Assembly (New England Biolabs) in a 3:1 ratio for 1 hour at 50° C. Assembled plasmids were purified by isopropanol precipitation with GlycoBlue Coprecipitant (Thermo Fisher) and reconstituted in milliQ water and transformed into NEB10beta (New England Biolabs) electrocompetent cells. Following recovery, a small dilution series was plated to assess transformation efficiency and the remainder was grown in liquid culture in DRM medium overnight at 37° C. A detailed step-by-step library cloning protocol is provided below.

[0376] The plasmid library was isolated by Midiprep plasmid purification (Qiagen). Library integrity was verified by restriction digest with SapI (New England Biolabs) for 1 hour at 37° C., and sequence diversity was validated by high-throughput sequencing (HTS) as described below.

### Library Cloning Primers

OligoLib_Fw
(SEQ ID NO: 8)
TTTTTGTTTTCTGTGTTCCGTTGTCCGTGCTGTAACGAAAGGATGGGTGC
GACGCGTCAT
OligoLib_Rv
(SEQ ID NO: 9)
GTTGATAACGGACTAGCCTTATTTAAACTTGCTATGCTGTTTCCAGCATA
GCTCTTAAAC
CircDonor_Fw
(SEQ ID NO: 10)
GTTTAAGAGCTATGCTGGAAACAGC
CircDonor_Rv
(SEQ ID NO: 11)
ATGACGCGTCGCACCCATCCTTTCGTTACAGCACGGACAACGGAACACAG
AAAACAAAAAAGCACCGACTC
PlasmidIns_Fw
(SEQ ID NO: 12)
GTAACTTGAAAGTATTTCGATTTCTTGGCTTTATATATCTTGTGGAAAGG
ACGAAACACC
PlasmidIns_Rv
(SEQ ID NO: 13)
TTGTGGTTTGTCCAAACTCATCAATGTATCTTATCATGTCTGCTCGAAGC
GGCCGTACCTCTAGATTCAGACGTGTGCTCTTCCGATCT

### Cloning.

[0378] A base plasmid was constructed starting from a Tol2-transposon containing plasmid (Addgene 71485)³⁴. The sequence between Tol2 sites was replaced with a CAGGS promoter, multi-cloning site, P2A peptide sequence followed by eGFP sequence, and Puromycin resistance cassette to produce p2T-CAG-MCS-P2A-GFP-PuroR. The full sequence of this plasmid is appended in the Sequences section below, and this plasmid has been submitted to Addgene.

[0379] Plasmids with this backbone and containing wildtype and micro-duplication mutation versions of LDLR and three other genes, GAA, GLB1, and PORCN, were constructed. Information on cloning these genes is provided below, and the gene sequences are appended below.

[0380] LDLR: To generate p2T-CAGGS-LDLRwt-P2A-GFP-PuroR, LDLR (NCBI Gene ID #3949, transcript variant 1 CDS) was PCR amplified from a base plasmid ordered from the Harvard PlasmID resource core and cloned between the BamHI and NheI sites of the base plasmid.

[0381] The following mutants were generated through InFusion (Clontech) cloning. Sequences are provided below, and the internal allele nomenclature is in parentheses:

LDLR:c.526_533dupGGCTCGGA (LDLRdup252)
(SEQ ID NO: 14)
LDLR:c.668_681dupAGGACAAATCTGAC (LDLRdup254/255)
(SEQ ID NO: 15)
LDLR:c.669_680dupGGACAAATCTGA (LDLRdup258)
(SEQ ID NO: 16)
LDLR:c.672_683dupCAAATCTGACGA (LDLRdup261)
LDLR:c.1662_1669dupGCTGGTGA (LDLRdup264)

[0382] PORCN: NCBI Gene ID #64840, transcript variant C CDS was PCR amplified from HCT116 cDNA and cloned between the BamHI and NheI sites of the base plasmid. PORCN:c.1059_1071dupCCTGGCTTTTATC (SEQ ID NO: 17) (PORCNdup20) was generated through InFusion cloning.

[0383] GLB1: NCBI Gene ID #2720, transcript variant 1 CDS was PCR amplified from HCT116 cDNA and cloned between the BamHI and NheI sites of the base plasmid. GLB1:c.1456_1466dupGGTGCATATAT (SEQ ID NO: 18) (GLB1dup84) was generated through InFusion cloning.

[0384] GAA: NCBI Gene ID #2548, transcript variant 1 CDS was PCR amplified from a base plasmid ordered from the Harvard PlasmID resource core and cloned between the BamHI and NheI sites of the base plasmid. GAA:c.2704_2716dupCAGAAGGTGACTG (SEQ ID NO: 19) (GAAdup327/328) was generated through InFusion cloning.

[0385] SpCas9¹ and KKH SaCas9⁹ were constructed starting from a Tol2-transposon containing plasmid (Addgene 71485)³⁴. The sequence between Tol2 sites was replaced with a CAGGS promoter, Cas9 sequence, and blasticidin resistance cassette to produce p2T-CAG-SpCas9-BlastR and p2T-CAG-KKHSaCas9-BlastR. These plasmids have been submitted to Addgene.

[0386] SpCas9 guide RNAs were cloned as a pool into a Tol2-transposon containing gRNA expression plasmid (Addgene 71485)³⁴ using BbsI plasmid digest and Gibson Assembly (NEB). SaCas9 guide RNAs were cloned into a similar Tol2-transposon containing SaCas9 gRNA expression plasmid (p2T-U6-sgsaCas2×BbsI-HygR) which has been submitted to Addgene using BbsI plasmid digest and Gibson Assembly. Protospacer sequences used are listed below, using the internal nomenclature which matches the duplication alleles.

LDLR gRNAs
sgsaLDLRdup252:
(SEQ ID NO: 20)
GCTGCGAAGATGGCTCGGAGGC
sgsaLDLRdup254:
(SEQ ID NO: 21)
GTGCAAGGACAAATCTGACAGG
sgsaLDLRdup255:
(SEQ ID NO: 22)
GTTCCTCGTCAGATTTGTCCTG
sgsaLDLRdup258:
(SEQ ID NO: 23)
GACTGCAAGGACAAATCTGAGG
sgsaLDLRdup261:
(SEQ ID NO: 24)
GTTTTCCTCGTCAGATTTGTCG
sgspLDLRdup264:
(SEQ ID NO: 25)
GACATCTACTCGCTGGTGAGC
PORCN gRNAs
sgspPORCNdup20:
(SEQ ID NO: 26)
GCTGTCCCTGGCTTTTATCCC
GLB1 gRNAs
sgspGLB1dup84:
(SEQ ID NO: 27)
GTGTGAACTATGGTGCATATA
GAA gRNAs
sgsaGAAdup327:
(SEQ ID NO: 28)
GCAGCTGCAGAAGGTGACTGCA
sgspGAAdup328:
(SEQ ID NO: 29)
GCTGCAGAAGGTGACTGCAGA

### Cell Culture.

[0387] Mouse embryonic stem cell lines used have been described previously and were cultured as described previously⁴⁴. HEK293T, HCT116, and U2OS cells were purchased from ATCC and cultured as recommended by ATCC. For stable Tol2 transposon plasmid integration, cells were transfected using Lipofectamine 3000 (Thermo Fisher) using standard protocols with equimolar amounts of Tol2 transposase plasmid²⁵ (a gift from Koichi Kawakami) and transposon-containing plasmid. For library applications, 15-cm plates with >10⁷ initial cells were used, and for single gRNA targeting, 6-well plates with >10⁶ initial cells were used. To generate lines with stable Tol2-mediated genomic integration, selection with the appropriate selection agent at an empirically defined concentration (blasticidin, hygromycin, or puromycin) was performed starting 24 hours after transection and continuing for >1 week. In cases where sequential plasmid integration was performed such as integrating gRNA/target library and then Cas9 or micro-duplication plasmid and then Cas9 plus gRNA, the same Lipofectamine 3000 transfection protocol with Tol2 transposase plasmid was performed each time, and >1 week of appropriate drug selection was performed after each transfection.

### Deep Sequencing.

[0388] Genomic DNA was collected from cells after >1 week of selection. For library samples, 16 μg gDNA was used for each sample; for individual locus samples, 2 μg gDNA was used; for plasmid library verification, 0.5 μg purified plasmid DNA was used.

[0389] For individual locus samples, the locus surrounding CRISPR/Cas9 mutation was PCR amplified in two steps using primers >50-bp from the Cas9 target site. PCR1 was performed using the primers specified below. PCR2 was performed to add full-length Illumina sequencing adapters using the NEB Next Index Primer Sets 1 and 2 (NEB) or internally ordered primers with equivalent sequences. All PCRs were performed using NEB Next polymerase (New England Bioscience). Extension time for all PCR reactions was extended to 1 min per cycle to prevent skewing towards GC-rich sequences. The pooled samples were sequenced using NextSeq (Illumina) at the Harvard Medical School Biopolymers Facility, the MIT BioMicro Center, or the Broad Institute Sequencing Facility.

### Library Prep Primers:

For LDLRDup252, 254, 255, 258, 261:
120417_LDLRDup254_r1_seq_A
(SEQ ID NO: 30)
CTTTCCCTACACGACGCTCTTCCGATCT NNN
ACTCCAGCTGGCGCTGTGAT
120417_LDLR254_r2seq_A
(SEQ ID NO: 31)
GGAGTTCAGACGTGTGCTCTTCCGATCT
CAACTTCATCGCTCATGTCCTTG
For LDLRDup264:
120817_LDLR264_r1seq_B
(SEQ ID NO: 32)
CTTTCCCTACACGACGCTCTTCCGATCT
NNNAACTCCCGCCAAGATCAAGAAAG
120817_LDLR264_r2seq_B
(SEQ ID NO: 33)
GGAGTTCAGACGTGTGCTCTTCCGATCT
CAGCCTCTTTTCATCCTCCAAGA
For PORCDup20:
120517_PORCN20_r1_seq
(SEQ ID NO: 34)
CTTTCCCTACACGACGCTCTTCCGATCT NNN
CCTCCTACATGGCTTCAGTTTCC
120517_PORCN20_r2seq
(SEQ ID NO: 35)
GGAGTTCAGACGTGTGCTCTTCCGATCT
CCAGAGCTCCAAAGAGCAAGTTT
For GLB1Dup84:
120517_GLB_184_r1seq
(SEQ ID NO: 36)
CTTTCCCTACACGACGCTCTTCCGATCT NNN
AGCCACTCTGGACCTTCTGGTA
120517_GLB_184_r2seq
(SEQ ID NO: 37)
GGAGTTCAGACGTGTGCTCTTCCGATCT
CCAGTCCGTGAGGATATTGGAAC
For GAADup327/328:
120517_GAA327_r1seq
(SEQ ID NO: 38)
CTTTCCCTACACGACGCTCTTCCGATCT NNN
GATCGTGAATGAGCTGGTACGTG
120517_GAA327_r2seq
(SEQ ID NO: 39)
GGAGTTCAGACGTGTGCTCTTCCGATCT
AACAGCGAGACACAGATGTCCAG

### Data Availability.

[0391] High-throughput sequencing data have been deposited in the NCBI Sequence Read Archive database under accession codes SRP141261 and SRP141144.

### Code Availability.

[0392] All data processing, analysis, and modeling code is available atgithub.com/maxwshen/inDelphi-dataprocessinganalysis. The inDelphi model is available online at the URLcrisprindelphi.design.

### Library Cloning Protocol

### Synthesized Oligo Library Sequence

(SEQ ID NO: 40)

[chemical structure]

[chemical structure]

PROTOSPACER depending on whether it naturally
starts with a G] GTTTAAGAGCTATGCTGGAAACAGC

### Linker Region/Oligo Library Amplification Primer Anneal Region

### Read 2 Sequencing Primer Stub

### SspI Restriction Site

### U6-Promoter Stub

[0394] sgRNA-Hairpin Stub
1. Oligo library QPCR to determine number of amplification cycles for Oligo Library PCR Notes: Amplification of oligos with relatively low GC-content is less efficient than GC-rich sequences. It was found that NEBNext polymerase was the least biased in amplification of the library. Increasing the elongation time to 1 min per cycle for all cloning and sequencing library prep PCRs eliminates GC-skewing of library sequences and reduces the rate of PCR-recombination.

[0395] Set up the following reaction:

| | | |
|---|---|---|
| 0.4 | ng | Synthesized Oligo Library |
| 10 | ul | NEBNext 2x Master Mix |
| 0.5 | ul | 20 uM OligoLib_Fw |
| 0.5 | ul | 20 uM OligoLib_Rv |
| 0.2 | ul | SybrGreen Dye (100x) |

| | |
|---|---|
| to 20 ul | H₂O |

### 67° C. Annealing Temperature

[0396] Check 246 bp amplicon size on 2.5% agarose gel.

[0397] Determine the point that signal amplification has plateaued.

### 2. Oligo Library PCR Amplification

[0398] Set up the following reaction:

| | | |
|---|---|---|
| 4 | ng | Synthesized Oligo Library |
| 50 | ul | NEBNext 2x Master Mix |
| 2.5 | ul | 20 uM OligoLib_Fw |
| 2.5 | ul | 20 uM OligoLib_Rv |

| | |
|---|---|
| to 100 ul | H₂O |

67° C. annealing temperature, 1 minute extension time.
Cycle number is half the number of cycles needed to reach signal amplification plateau in the QPCR in step 1, reduced by 1 cycle to scale for DNA input.

[0399] PCR purify amplified sequence.

### 3. Donor Template Amplification

[0400] Set up the following reaction:

| | | |
|---|---|---|
| 5 | ng | spCas9 sgRNA plasmid (71485) |
| 50 | ul | NEBNext 2x Master Mix |
| 2.5 | ul | 20 uM CircDonor_Fw |
| 2.5 | ul | 20 uM CircDonor_Rv |

| | |
|---|---|
| to 100 ul | H₂O |

62° C. annealing temperature
20 cycles

[0401] Gel purify 167 bp band from 2.5% agarose gel.

### 4. Circular Assembly and Restriction Digest Linearization

[0402] Note: A molar ratio of donor template to amplified oligo library of 3:1 was used. An increase in amplified oligo library compounds cross-over within library members resulting in mismatch of protospacer and target sequences.

[0403] Set up the following reaction:

| | | |
|---|---|---|
| 429 | ng | Donor template |
| 239 | ul | Amplified Oligo Library |
| 30 | ul | Gibson Assembly 2x Master Mix |

| | |
|---|---|
| to 60 ul | H₂O |

50° C. incubation for 1 hour.

[0404] Exonuclease treatment

| | |
|---|---|
| 60 ul | Circular assembly reaction |
| 9 ul | ATP (25 mM) |
| 9 ul | 10x Plasmid Safe Buffer |
| 3 ul | Plasmid Safe Nuclease |
| 9 ul | H₂O |

37° C. incubation for 1 hour.

[0405] PCR purify and elute in 50 ul.

[0406] Digest to linearize library

| | |
|---|---|
| 50 ul | Purified assemblies |
| 10 ul | 10x CutSmart Buffer |
| 3 ul | Sspl-HF |
| 37 ul | H₂O |

37° C. incubation for ≥3 hours.

[0407] Gel purify 273 bp band from 2.5% agarose gel.

Note: Band is sometimes fuzzy and poorly visible. If not clearly discernible, proceed with gel isolation between 200-300 bp.

### 5. Linearized Library QPCR to Determine Number of Amplification Cycles for PCR Amplification

[0408] Set up the following reaction:

| | |
|---|---|
| 0.5% | Purified linearized library |
| 10 ul | NEBNext 2x Master Mix |
| 0.5 ul | 20 uM PlasmidIns_Fw |
| 0.5 ul | 20 uM PlasmidIns_Rv |
| 0.2 ul | SybrGreen Dye (100x) |
| to 20 ul | H₂O |

65° C. annealing temperature

[0409] Determine the point that signal amplification has plateaued.

### 6. Linearized Library PCR Amplification

[0410] Set up the following reaction:

| | |
|---|---|
| 50% | Purified linearized library |
| 50 ul | NEBNext 2x Master Mix |
| 2.5 ul | 20 uM PlasmidIns_Fw |
| 2.5 ul | 20 uM PlasmidIns_Rv |
| to 100 ul | H₂O |

65° C. annealing temperature, 1 minute extension time.
Cycle number is number of cycles needed to reach signal amplification plateau in the QPCR in step 5, reduced by 4 cycles to scale for increased DNA input.

[0411] Gel purify 375 bp band from 2.5% agarose gel.

### 7. Vector Backbone Digest

[0412] Set up the following reaction:

| | | |
|---|---|---|
| 2 | ug | spCas9 sgRNA plasmid (71485) |
| 10 | | 10x Buffer 2.1 |
| 3 | | BbsI |
| 2 | | XbaI |

| | |
|---|---|
| to 100 ul | H₂O |

37° C. incubation for >3 hours.

[0413] Gel purify 5.9 kb band from 1% agarose gel.

### 8. Vector Assembly and Cleanup

[0414] Note: Include a ligation with water for insert as a control.

[0415] Set up the following reaction:

| | | |
|---|---|---|
| 300 | ng | Digested vector backbone |
| 42 | ng | Amplified Oligo Library |
| 30 | ul | Gibson Assembly 2x Master Mix |

| | |
|---|---|
| to 60 ul | H₂O |

50° C. incubation for 1 hour.

[0416] Isopropanol precipitation

| | | |
|---|---|---|
| 40 | ul | Vector assembly reaction |
| 0.4 | ul | GlycoBlue Coprecipitant |
| 0.8 | ul | 50 mM NaCl |
| 38.8 | ul | Isopropanol |

[0417] Vortex and incubate at room temperature for 15 minutes.

[0418] Spin down at ≥15.000 g for 15 minutes, and carefully remove supernatant.

[0419] Wash pellet with 300 ul 80% EtOH and repeat spin at >15.000 g for 5 minutes.

[0420] Carefully remove all liquid without disturbing pellet, and let air dry for 1-3 minutes.—Dissolve dried pellet in 10 ul H₂O at 55° C. for 10 minutes.

### 9. Transformation

[0421] Note: Electroporation competent cells give a higher transformation efficiency than chemically competent cells. NEB10beta electro-competent cells were used, however these can be substituted for other lines and transformed according to the manufacturer's instructions.

Note: DRM was used as recovery and culture medium to enhance yield. If substituting for a less rich medium such as LB, it is recommended scaling up the culture volume to obtain similar plasmid DNA quantities.
Note: Antibiotic free recovery time should be limited to 15 minutes to prevent shedding of transformed plasmids from replicating bacteria.
Note: Also transform water ligation as control.

[0422] Pre-warm 3.5 mL recovery medium per electroporation reaction, at 37° C. for 1 hour.

[0423] Pre-warm LB-agar plates containing appropriate antibiotic.

[0424] Per reaction, add 1 ul purified vector assembly to 25 ul competent cells on ice. Perform 8 replicate reactions.

[0425] Electroporate according to the manufacturer's instructions.

[0426] Immediately add 100 ul pre-warmed recovery media per cuvette and pool all replicates into culture flask.

[0427] Add 1 mL recovery media per replicate reaction to culture flask and shake at 200 rpm 37° C. for 10-15 minutes.

[0428] Plate a dilution series from 1:104-1:106 on LB-agar plates containing antibiotic and grow overnight at 37° C.

[0429] Add 2 mL media per replicate reaction and admix appropriate antibiotic.

[0430] Grow overnight in shaking incubator at 200 rpm 37° C.

[0431] Assess transformation efficiency from serial dilution LB-agar plates. Expect ˜10⁶ clones.

The development of this cloning protocol was guided by work described in Videgal et al. 2015.

### Sequence Alignment and Data Processing

[0432] For library data, each sequenced pair of gRNA fragment and target was associated with a set of designed sequence contexts G by finding the designed sequence contexts for all gRNAs whose beginning section perfectly matches the gRNA fragment (read 1 in general does not fully sequence the gRNA), and by using locality sensitive hashing (LSH) with 7-mers on the sequenced target to search for similar designed targets. An LSH score on 7-mers between a reference and a sequenced context reflects the number of shared 7-mers between the two. If the best reference candidate scored, through LSH, greater than 5 higher than the best LSH score of the reference candidates obtained from the gRNA-fragment, the LSH candidate is also added to G. LSH was used due to extensive (˜33% rate) PCR recombination between read1 and read2 which in sequenced data appears as mismatched read1 and read2 pairs. The sequenced target was aligned to each candidate in G and the alignment with the highest number of matches is kept. Sequence alignment was performed using the Needleman-Wunsch algorithm using the parameters: +1 match, −1 mismatch, −5 gap open, −0 gap extend. For library data, starting gaps cost 0. For all other data, starting and ending gaps cost 0. For VO data, sequence alignments were derived from SAM files from SRA.

[0433] Alignments with low-accuracy or short matching sections flanked by long (10 bp+) insertions and deletions were filtered out as PCR recombination products (observed frequency of ˜5%). These PCR recombination products are different than that occurring between read1 and read2; these occur strictly in read2. Alignments with low matching rates were removed. Deletions and insertions were shifted towards the expected cleavage site while preserving total alignment score. CRISPR-associated DNA repair events were defined as any alignment with deletions or insertions occurring within a 4 bp window centered at the expected cut site and any alignment with both deletions and insertions (combination indel) occurring with a 10 bp window centered at the expected cut site. All CRISPR-associated DNA repair events observed in control data had their frequencies subtracted from treatment data to a minimum of 0.

[0434] Replicate experiments were carried out for library data in each cell type. For each cell-type, each sequence context not fulfilling the following data quality criteria was filtered: data at this sequence context in the two replicates with the highest read-counts must have at least 1000 reads of CRISPR editing outcomes in both replicates, and a Pearson correlation of at least 0.85 in the frequency of microhomology-based deletion events. The class of microhomology-based deletion events was used for this criterion since it is a major repair class with the highest average replicability across experiments. For disease library data in U2OS and HEK, a less stringent read count threshold of 500 was used instead.

### Details on Alignment Processing

[0435] All alignments with gaps were shifted as much as possible towards the cleavage site while preserving the overall alignment score. Then, the following criteria were used to categorize the alignments into noise, not-noise but not CRISPR-associated (for example, wildtype); as well as primary and secondary CRISPR activity. All data used in modeling and analysis derive solely from outcomes binned into primary CRISPR activity.

[0436] The following criteria was used to filter library alignments into “noise” categories.

[0437] Homopolymer: Entire read is homopolymer of a single nucleotide. Not considered a CRISPR repair product.

[0438] Has N: Read contains at least one N. Discarded as noise, not considered a CRISPR repair product.

[0439] PCR Recombination: Contains recombination alignment signature: (1) if a long indel (10 bp+) followed by chance overlap followed by long indel (10 bp+) of the opposite type, e.g., insertion-randommatch-deletion and deletion-randommatch-insertion. OR, if one of these two indels is 30 bp+, the other can be arbitrarily short. If either criteria is true, and if the chance overlap is length 5 or less, or any length with less than 80% match rate, then it satisfies the recombination signature. In addition, if both indels are 30 bp+, regardless of the middle match region, it satisfies the recombination signature. Finally, if randommatch is length 0, then indel is allowed to be any length. Not considered a CRISPR repair product.

[0440] Poor-Matches: 55 bp designed sequence context has less than 5 bp representation (could occur from 50 bp+ deletions or severe recombination) or less than 80% match rate. Not considered a CRISPR repair product.

[0441] Cutsite-Not-Sequenced: The read does not contain the expected cleavage site.

[0442] Other: An alignment with multiple indels where at least one non-gap region has lower than an 80% match rate. Or generally, any alignment not matching any defined category above or below. In practice, can include near-homopolymers. Not considered a CRISPR repair product.

[0443] The following criteria was used to filter library alignments into “main” categories.

[0444] Wildtype: No indels in all of alignment. Not considered a CRISPR repair product.

[0445] Deletion: An alignment with only a single deletion event. Subdivided into:

[0446] Deletion—Not CRISPR: Single deletion occurs outside of 2 bp window around cleavage site. Not considered a CRISPR repair product.

[0447] Deletion—Not at cut: Single deletion occurring within 2 bp window around cleavage site, but not immediately at cleavage site. Considered a CRISPR repair product.

[0448] Deletion: Single deletion occurring immediately at cleavage site. Considered a CRISPR repair product.

[0449] Insertion: An alignment with only a single insertion event. Subdivided into:

[0450] Insertion—Not CRISPR: Single insertion occurs outside of 10 bp window around cleavage site. Not considered a CRISPR repair product.

[0451] Insertion—Not at cut: Single insertion occurring within 2 bp window around cleavage site, but not immediately at cleavage site. Considered a CRISPR repair product.

[0452] Insertion: Single insertion occurring immediately at cleavage site. Considered a CRISPR repair product.

[0453] Combination indel: An alignment with multiple indels where all non-gap regions have at least 80% match rate. Subdivided into:

[0454] Combination Indel: All indels are within a 10 bp window around the cleavage site. Considered a primary CRISPR repair product.

[0455] Forgiven Combination Indel: At least two indels, but not all, are within a 10 bp window around the cleavage site. Considered a rarer secondary CRISPR repair product, ignored.

[0456] Forgiven Single Indel: Exactly one indel is within a 10 bp window around the cleavage site. Considered a rarer secondary CRISPR repair product, ignored.

[0457] Combination Indel—Not CRISPR: No indels are within a 10 bp window around the cleavage site. Not considered a CRISPR repair product.

[0458] It is noted that deletion and insertion events, even those spanning many bases, are defined to occur at a single location between bases. As such, events occurring up to 5 bp away from the cleavage site are defined as events where there are five or fewer matched/mismatched alignment positions between the event and the cleavage site, irrespective of the number of gap dashes in the alignment.

Selection of Variants from Disease Databases

[0459] Disease variants were selected from the NCBI ClinVar database (downloaded Sep. 9, 2017)¹⁶ and the Human Gene Mutation Database (publicly available variant data from before 2014.3)¹⁷ for computational screening and subsequent experimental correction.

[0460] A total of 4,935 unique variants were selected from Clinvar submissions where the functional consequence is described as complete insertions, deletions, or duplications where the reference or alternate allele is of length less than or equal to 30 nucleotides. Variants were included where at least one submitting lab designated the clinical significance as ‘pathogenic’ or ‘likely pathogenic’ and no submitting lab had designated the variant as ‘benign’ or ‘likely benign’, including variants will all disease associations. More complex indels and somatic variants were included. A total of 18,083 unique insertion variants were selected from HGMD which were between 2 to 30 nucleotides in length. Variants were included with any disease association with the HGMD classification of ‘DM’ or disease-causing mutation.

[0461] SpCas9 gRNAs and their cleavage sites were enumerated for each disease allele. Using a previous version of inDelphi, genotype frequency and indel length distributions were predicted for each tuple of disease variant and unique cleavage site. Among each unique disease, the single best gRNA was identified as the gRNA inducing the highest predicted frequency of repair to wildtype genotype, and if this was impossible (due to, for example, a disease allele with 2+ bp deletion), then the single best gRNA was identified as the gRNA inducing the highest predicted frameshift repair rate. 1327 sequence contexts were designed in this manner for Lib-B. An additional 265 sequence contexts were designed by taking the 265 sequence contexts in any disease in decreasing order of predicted wildtype repair rate, starting with Clinvar, stopping at 45% wildtype repair rate, then continuing with HGMD. This yielded 1592 total sequences derived from Clinvar and HGMD.

### Definition of Delta-Positions

[0462] Using the MMEJ mechanism, deletion events can be predicted at single-base resolution. For computational convenience, the tuple (deletion length, delta-position) was used to construct a unique identifier for deletion genotypes. A delta-position associated with a deletion length N is an integer between 0 and N inclusive (FIGS. 19A-19D). In a sequence alignment, a delta-position describes the starting position of the deletion gap in the read w.r.t. the reference sequence relative to the cleavage site. For a deletion length N and a cleavage site at position C such that seq[:C] and seq[C:] yield the expected DSB products where the vector slicing operation vector[index1:index2] is inclusive on the first index and exclusive on the second index (python style), a delta-position of 0 corresponds to a deletion gap at seq[C-N+0: C+0], and generally with a delta-position of D, the deletion gap occurs at seq[C-N+D: C+D]. Microhomologies can be described with multiple delta-positions. To uniquely identify microhomology-based deletion genotypes, the single maximum delta-position in the redundant set is used. Microhomology-less deletion genotypes are associated with only a single delta position and deletion length tuple; this was used as its unique identifier.

[0463] Another way to define delta-positions can be motivated by the example workflow shown above on MH deletions describing how each microhomology is associated with a deletion genotype. In that workflow, the delta-position is the number of bases included on the top strand before “jumping down” to the bottom strand.

[0464] MH-less medial end-joining products correspond to all MH-less genotypes with delta-position between 1 and N−1 where N is the deletion length. MH-less unilateral end-joining products correspond to MH-less genotypes with delta-position 0 or N. It is noted that a deletion genotype with delta position N does not immediately imply that it is a microhomology-less unilateral end-joining product since it may contain microhomology (it's possible that delta-positions N−j, N−j+1, . . . , N all correspond to the same MH deletion.)

### Definition of Precision Score

[0465] For a distribution X, where |X| indicates its cardinality (or length when represented as a vector):

$$PrecisionScore ( X ) = 1 - \frac{- {\sum }_{i = 1}^{n} P ( {x}_{i} ) log ( P ( {x}_{i} ) )}{log ( \vert X \vert )}$$

This precision score ranges between zero (minimally precise, or highest entropy) to one (maximally precise, or lowest entropy).
inDelphi Deletion Modeling: Neural Network Input and Output

[0466] inDelphi receives as input a sequence context and a cleavage site location, and outputs two objects: a frequency distribution on deletion genotypes, and a frequency distribution on deletion lengths.

[0467] To model deletions, inDelphi trains two neural networks: MH-NN and MHless-NN.

[0468] MH-NN receives as input a microhomology that is described by two features: microhomology length and GC fraction in the microhomology. Using these features, MH-NN outputs a number (psi). MHless-NN receives as input the deletion length. Using this feature, MHless-NN outputs a number (psi).

[0469] A phi score is obtained from a psi score using: phi_i=exp(psi_i−0.25*deletion_length), where 0.25 is a “redundant” hyperparameter that serves to reduce training speed by helpful scaling. This relationship between psi and phi is differentiable and encodes the assumption that the frequency of an event exponentially increases with neural network output psi (which empirically appears to reflect MH strength) and exponentially decreases with its minimum necessary resection length (deletion length).

[0470] The architecture of the MH-NN and MHless-NN networks are input-dimension->16->16->1 for a total of two hidden layers where all nodes are fully connected. Sigmoidal activations are used in all layers except the output layer. All neural network parameters are initialized with Gaussian noise centered around 0.

inDelphi Deletion Modeling: Making Predictions

[0471] Given a sequence context and cleavage site, inDelphi enumerates all unique deletion genotypes as a tuple of its deletion length and its delta-position for deletion lengths from 1 bp to 60 bp. For each microhomology enumerated, an MH-phi score is obtained using MH-NN. In addition, for each deletion length from 1 bp to 60 bp, an MHindep-phi score is obtained using MHless-NN.

[0472] inDelphi combines all MH-phi and MHindep-phi scores for a particular sequence context into two objects—a frequency distribution on deletion genotypes, and a frequency distribution on deletion lengths—which are both compared to observations for training. The model is designed to output two separate objects because both are of biological interest, and separate but intertwined modeling approaches are useful for generating both. By learning to generate both objects, inDelphi jointly learns about microhomology-based deletion repair and microhomology-less deletion repair.

[0473] To generate a frequency distribution on deletion genotypes, inDelphi assigns a score for each microhomology. Score assignment considers the concept of “full” microhomology and treats full and not full MHs differently.

[0474] A microhomology is “full” if the length of the microhomology is equal to its deletion length. The biological significance of full microhomologies is that there is only a single deletion genotype possible for the entire deletion length, while in general, a single deletion length is consistent with multiple genotypes. In addition, this single genotype can be generated through not just the MH-dependent MMEJ mechanism but also through MH-less end-joining, for example as mediated by Lig4. Therefore, full microhomologies were modelled as receiving contributions from both MH-containing and MH-less mechanisms by scoring full microhomologies as MH-phi[i]+MHindep-phi[j] for deletion length j and microhomology index i. Microhomologies that are not “full” are assigned a score of MH-phi[i] for MH index i.

[0475] Scores for all deletion genotypes assigned this way are normalized to sum to 1 to produce a predicted frequency distribution on deletion genotypes.

[0476] To generate a frequency distribution on deletion lengths, inDelphi assigns a score for each deletion length. Score assignment integrates contributions from both MH-dependent and MH-independent mechanisms via the following procedure: For each deletion length j, its score is assigned as MHindep-phi[j] plus the sum of MH-phi for each microhomology with that deletion length. Scores for all deletion lengths are normalized to sum to 1 to produce a frequency distribution.

[0477] inDelphi trains its parameters using a single sequence context by producing both a predicted frequency distribution on deletion genotypes and deletion lengths and minimizing the negative of the sum of squared Pearson correlations for both objects to their observed versions. In practice, deletion genotype frequency distributions are formed from observations for deletion lengths 1-60, and deletion length frequency distributions are formed from observations for deletion lengths 1-28. Both neural networks are trained simultaneously on both tasks. inDelphi is trained with stochastic gradient descent with batched training sets. inDelphi is implemented in Python using the autograd library. A batch size of 200, an initial weight scaling factor of 0.10, an initial step size of 0.10, and an exponential decaying factor for the step size of 0.999 per step were used.

inDelphi Deletion Modeling: Summary and Revisiting Assumptions

[0478] In summary, inDelphi trains MH-NN, which uses as input (microhomology length, microhomology GC content) to output a psi score which is translated into a phi score using deletion length. This phi score represents the “strength” of the microhomology corresponding to a particular MH deletion genotype. It also trains MHless-NN which uses as input (deletion length) to directly output a phi score representing the “total strength” of all MH-independent activity for a particular deletion length.

[0479] While the model assumes that microhomology and microhomology-less repair can overlap in contributions to a single repair genotype, this assumption is made conservatively by assuming that their contributions overlap only when there is no alternative. Specifically, in the context of a deletion length with full microhomology, the model assumes that they must overlap, while in the context of a deletion length without full microhomology, inDelphi allows MHindep-phi to represent all MH-less repair genotypes and none of the MH-dependent repair genotypes which are represented solely using their MH-phi scores. This can be seen by noting that at a deletion length j without full microhomology, MH genotypes are scored using their MH-phi scores, while the length j is scored by MHindep-phi[j] plus the sum of MH-phi for each microhomology. Therefore, the subset of MH-less genotypes at this deletion length have a score MHindep-phi[j].

[0480] When the subset of MH-less genotypes includes only one MH-less genotype, this single genotype's score is equal to MHindep-phi[j]. In general, multiple MH-less genotypes are possible, in which case the total score of all of the MH-less genotypes is equal to MHindep-phi[j].

[0481] The relative frequency of MH deletions and MH-less deletions is learned implicitly by the balancing between the sum of all MH-phi and MHindep-phi. Since MHindep-phi does not vary by sequence context while MH-phi does, the model assumes that variation in the fraction of deletions that use MH can at least partially be explained by varying sequence microhomology as represented by MH-NN.

inDelphi Insertion Modeling

[0482] Once inDelphi is trained on both deletion tasks, it predicts insertions from a sequence context and cleavage site by using the precision score of the predicted deletion length distribution and total deletion phi (from all MH-phi and MHindep-phi). inDelphi also uses one-hot-encoded binary vectors encoding nucleotides −4 and −3. In a training set, these features are collected and normalized to zero mean and unit variance, and the fraction of 1-bp insertions over the sum counts of 1-bp insertions and all deletions are tabulated as the prediction goal. A k-nearest neighbor model is built using the training data. inDelphi uses the default parameter k=5.

[0483] On test data, the above procedure is used to predict the frequency of 1-bp insertions out of 1-bp insertions and all deletions for a particular sequence context. Once this frequency is predicted, it is used to make frequency predictions for each of the 4 possible insertion genotypes, which are predicted by deriving from the training set the average insertion frequency for each base given its local sequence context. When the training set is small, only the −4 nucleotide is used. When the training set is relatively large, nucleotides −5, −4, and −3 are used.

[0484] To produce a frequency distribution on 1-bp insertions and 1-60 bp deletion genotypes, scores for all deletion genotypes and all 1-bp insertions are normalized to sum to 1. To produce a frequency distribution on indel lengths (+1 to −60), scores for all deletion lengths and 1-bp insertions are normalized to sum to 1.

inDelphi: Repair Classes Predicted at Varying Resolution

[0485] inDelphi predicts MH-deletions and 1-bp insertions at single base resolution. Measuring performance on the task of genotype frequency prediction considers this subset of repair outcomes only (about 60-70% of all outcomes).

[0486] inDelphi predicts MH-less deletions to the resolution of deletion length. That is, inDelphi predicts a single frequency corresponding to the sum total frequency of all unique MH-less deletion genotypes possible for a particular deletion length. This modeling choice was made because genotype frequency replicability among MH-less deletions is substantially lower than among MH deletions.

[0487] Measuring performance on the task of indel length frequency considers MH deletions, MH-less deletions, and 1-bp insertions (90% of all outcomes).

[0488] In practice, if end-users desire, they can extend inDelphi predictions to frequency predictions for specific MH-less deletion genotypes by noting that MH-less deletions are distributed uniformly between 0 delta-position genotypes, medial genotypes, and N delta-position genotypes.

Comparison with a Linear Baseline Model

[0489] inDelphi was compared to a baseline model with the same model structure but replacing the deep neural networks with linear models. The comparison was done using Lib-A mESC data. While inDelphi achieves a mean held-out Pearson correlation of 0.851 on deletion genotype frequency prediction and 0.837 on deletion length frequency prediction, the linear baseline model achieves a mean held-out Pearson correlation of 0.816 on deletion genotype frequency prediction and 0.796 on deletion length frequency prediction. When including the third model component for 1-bp insertion modeling and testing on genotype frequency prediction for 1-bp insertions and all deletions, inDelphi achieves a median held-out Pearson correlation of 0.937 and 0.910 on the task of indel length frequency prediction. The linear baseline model achieves a median held-out Pearson correlation of 0.919 and 0.900 on the two tasks respectively.

[0490] From these results, it is shown that much of the model's power is derived from its designed structure which is independent of the choice of linear or non-linear modeling. While the baseline does not significantly cripple the model, the use of deep nonlinear neural networks offers a substantial performance improvement (10-24%) above linear modeling. In addition, the strong performance of the linear baseline model highlights that the prediction task, given the model structure, is relatively straightforward. This suggests that the model should be able to generalize well to unseen data.

[0491] The deep neural network version of MH-NN learns that microhomology length is more important than % GC (FIGS. 18A-18H). The linear version learns the same concept, with a weight of 1.1585 for MH length and 0.332 for % GC.

Comparison with a Baseline Model Lacking Microhomology Length as a Feature

[0492] Microhomology length is an important feature for MH-NN (FIGS. 18A-18H). A model was trained that uses only % GC as input to MH-NN while keeping the rest of the model structure identical. On held-out data, this baseline model at convergence achieves to a mean Pearson correlation of 0.59 on the task of predicting deletion genotype frequencies, and a mean Pearson correlation of 0.58 on the task of predicting deletion length frequencies. Notably, a model at iteration 0 with randomly initialized weights achieves mean Pearson correlations of 0.55 and 0.54 on the two respective tasks on held-out data. This basal Pearson correlation is relatively high due to the model structure, in particular, the exponential penalty on deletion length. In sum, removing MH length as a feature severely impacts model performance, restricting it to predictive performance not appreciably better than random chance.

inDelphi Training and Testing on Data from Varying Cell-Types

[0493] For predicting genotype and indel length frequencies in any particular cell-type C where data D is available, inDelphi's deletion component was first trained on a subset of Lib-A mESC data. Then, k-fold cross-validation was applied on D where D is iteratively split into training and test datasets. For each cross-validation iteration, the training set is used to train the insertion frequency model (k-nearest neighbors) and insertion genotype model (matrix of observed probabilities of each inserted base given local sequence context, which is just the −4 nucleotide when the training dataset is small, and −5, −4 and −3 nucleotides when the training dataset is large). For each cross-validation iteration, predictions are made at each sequence context in the test set which are compared to observations for each sequence context to yield a Pearson correlation. For any particular sequence context, the median test-time Pearson correlation across all cross-validation iterations is used as a single number summary of the overall performance of inDelphi. For all reported results, 100-fold cross-validation was used with 80%/20% training and testing splits. Empirically, small variance in test-time Pearson correlation was observed, highlighting the stability of inDelphi's modeling approach.

inDelphi Testing on Endogenous VO Data

[0494] On this task, the deletion component of inDelphi was trained on a subset of the Lib-A mESC data. For each cell type in HCT116, K562, and HEK293T, all VO sequence contexts (about 100) were randomly split into training and test datasets 100 times. During each split, the training set was used for k-nearest neighbor modeling of 1-bp insertion frequencies. Feature normalization to zero mean and unit variance was not performed. The average frequency of each 1-bp insertion genotype was derived from the training set as well. For each of the ˜100 sequence contexts, the median test-time Pearson correlation was used for plotting in FIGS. 13A-13D. Due to the small size of the training set, only the −4 nucleotide was used for modeling both the insertion frequency and insertion genotype frequencies.

inDelphi Testing on Library Data

[0495] On this task, the deletion component of inDelphi was trained on a subset of the Lib-A mESC data. The remaining test set was used for measuring test-time prediction performance on Lib-A. Nucleotides −5, −4, and −3 were used for the insertion genotype model. For testing on Lib-B, Lib-B was split into training and test datasets in the same manner as with VO data. Nucleotide −4 was used for the insertion genotype model. The median test-time Pearson correlation is used as a single number summary of the overall performance of inDelphi on any particular sequence context. For reporting predictive results in FIGS. 15A-15F, sequence contexts with low replicability (less than 0.85 Pearson correlation) in observed editing outcome frequencies were first removed.

inDelphi training and testing on Prkdc^{-/-}Lig4^{-/-} data inDelphi was trained on data from 946 Lib-A sequence contexts and tested on 168 held-out Lib-A sequence contexts. Nucleotide −4 was used for insertion rate modeling, all other modeling choices were standard as described above. On held-out data, this version of inDelphi achieved a median Pearson correlation of 0.84 on predicting indel genotype frequencies, and 0.80 on predicting indel length frequencies.
Training the Online Public Version of inDelphi and its Expected Properties

[0496] For general-use on arbitrary cell types, a version of inDelphi was trained using additional data from diverse types of cells. Deletion modeling was trained using data from 2,464 sequence contexts from high-replicability Lib-A and Lib-B data (including clinical variants and microduplications, fourbp, and longdup) in mES and data from VO sequence contexts in HEK293 and K562. Insertion frequency modeling is implemented as above. Insertion genotype modeling uses nucleotides −5, −4, and −3. The insertion frequency model and insertion genotype model are trained on VO endogenous data in K562 and HEK293T, Lib-A data in mESC, and Lib-B data (including clinical variants and microduplications, fourbp, and longdup) in mESC and U2OS.

[0497] Though MHless-NN, as trained on library data, never receives information on deletion lengths beyond 28, it was allowed to generalize its learned function and make predictions on deletion lengths up to 60 bp to match the supported range of MH-NN.

[0498] inDelphi makes predictions on 1-bp insertions and 1-60-bp deletions, which were empirically shown to consist of higher than 90% of all Cas9 editing outcomes in data from multiple human and mouse cell lines. Nevertheless, there is a subset of repair (about 8% on average) that inDelphi does not attempt to predict. It is suggested that end-users, depending on what predictive quantities are of interest, take this into account when using inDelphi. For example, if inDelphi predicts that 60% of 1-bp insertions and 1-60-bp deletions at a disease allele correspond to repair to wildtype genotype, a quantity of interest may be the rate of wildtype repair in all Cas9 editing outcomes (including the 8% not predicted by inDelphi). In such a situation, this quantity can be calculated as (92%*60%)=55.2%.

[0499] By the design of 1872 sequence contexts in Lib-A, the training dataset has rich and uniform representation across all quintiles of several major axes of variation including GC content, precision, and number of bases participating in microhomology as measured empirically in the human genome. This design strategy enables inDelphi to generalize well to arbitrary sequence contexts from the human genome.

[0500] These training data further include data in the outlier range of statistics of interest, including extremely high and low precision repair distributions, and extremely weak and strong microhomology (minimal microhomology and extensive microduplication microhomology sequences). The availability of such sequences in the training data enables inDelphi to generalize well to sequence contexts of clinical interest and sequence contexts supporting unusually high frequencies of precision repair. In particular, by training on more than 1000 examples of repair at clinical microduplications, inDelphi has received strong preparation for accurate prediction on other clinical microduplications.

[0501] By training on data from many cell-types, inDelphi was enabled to make predictions that are generally applicable to many human cell-types. It is noted that the HCT116 human colon cancer cell line experiences a markedly higher frequency of single base insertions compared to all other cell lines that were studied, possibly due to the MLH1 deficiency of this cell line leading to impaired DNA mismatch repair. For this reason, HCT116 data was excluded from the training dataset. For best results, it is suggested that end-users keep in mind that repair class frequencies can be cell type-dependent, and this issue has not been well-characterized thus far.

[0502] It is noted that inDelphi's main error tendency is on the side of overestimating rather than underestimating the precision of repair (FIGS. 14A-14F, FIGS. 15A-15F). In general, this tendency can be explained by noting that inDelphi only considers sequence microhomology as a factor, while it's plausible and likely in biological experimental settings that even sequence contexts with very strong sequence microhomology may not yield precise results due to noise factors that are not considered by inDelphi. For best results, it is recommended that end-users take this tendency into account when using inDelphi predictions for further experiments. In particular, if gRNAs are designed by using a minimum precision threshold, end-users should recognize that observed repair outcomes may have empirical precision under this threshold. However, conversely, it is unlikely that a gRNA will have precision higher than what inDelphi predicts.

### Lib-A Design (see Table 4)

[0503] All designed sequence contexts were 55 bp in length with cutting between the 27^{th} and 28^{th} base.

[0504] 1872 sequence contexts were designed by empirically determining the distribution of four statistics in sequence contexts from the human genome. These four statistics are GC content, total sum of bases participating in microhomology for 3-27-bp deletions, Azimuth predicted on-target efficiency score, and the statistical entropy of the predicted 3-27-bp deletion length distribution from a previous version of inDelphi. For each of these statistics, empirical quintiles were derived by calculating these statistics in a large number of sequence contexts from the human genome. For the library, sequence contexts were designed by randomly generated DNA that categorized into each combination of quintiles across each of the four statistics. For example, a sequence context falling into the 1^{st} quintile in GC, 2^{nd} quintile of total MH, 1^{st} quintile of Azimuth score, and 5^{th} quintile of entropy, was found by random search. With four statistics and five bins each (due to quintiles), there are 5⁴=625 possible combinations. For each combination, it was attempted to design three sequence contexts for a total of 1875; 3 sequences could not be designed (for a total of 1872) though each bin was filled. 90 sequence contexts were designed from VO sequence contexts. Other sequence contexts were also designed for a total of 2000 sequence contexts in Lib-A. Lib-A sequence names, gRNAs, and sequence contexts are listed in Table 4 (appended, forming part of the instant specification).

### Lib-B Design (see Table 5)

[0505] All designed sequence contexts were 55 bp in length with cutting between the 27^{th} and 28^{th} base.

[0506] 1592 sequence contexts were designed from Clinvar and HGMD (see section on Selection of variants from disease databases). Some disease sequence contexts were designed that such that the corrected wildtype or frameshift allele supports further cutting by the original gRNA; data from such sequence contexts were ignored during analysis. 57 “longdup” sequence contexts were designed by repeating the following procedure three times: for N=7 to 25, an N-mer was randomly generated, then duplicating and surrounded by randomly generated sequences, while ensuring that SpCas9 NGG was included and appropriately positioned for cutting between positions 27 and 28. 90 sequence contexts were designed from VO sequence contexts. 228 “fourbp” sequence contexts were designed at 3 contexts with random sequences (with total phi score on average lower than VO sequence contexts) while varying positions −5 to −2; for each of the 3 “low-microhomology” contexts, 76 four bases were randomly designed while ensuring representation from all possible 2 bp microhomology patterns including no microhomology, one base of microhomology at either position, and full two bases of microhomology. Other sequence contexts were also designed for a total of 2000 sequence contexts in Lib-B. Lib-B sequence names, gRNAs, and sequence contexts are listed in Table 5.

### Generating a DNA Motif for 1-Bp Insertion Frequencies

[0507] Nucleotides from positions −7 to 0 were one-hot-encoded and used in ridge regression to predict the observed frequency of 1-bp insertions out of all Cas9 editing events in 1996 sequence contexts from Lib-A mESC data. The data were split into training and testing sets (80/20 split) 10,000 times to calculate a bootstrapped estimate of linear regression weights and test-set predictive Pearson correlation. The median test-set Pearson correlation was found to be 0.62. To generate a DNA motif, any features that included 0 within the bootstrapped weight range were excluded (probability that the weight is zero >1e-4). The average bootstrapped weight estimate was used as the “logo height” for all remaining features. Each feature is independent; vertical stacking of features follows the published tradition of DNA motifs.

Plasmid and insert sequences
P2T-CAG-MCS-P2A-GFP-PuroR complete plasmid sequence
(SEQ ID NO: 41)
CCACCTAAATTGTAAGCGTTAATATTTTGTTAAAATTCGCGTTAAATTTTTGTTAAAT
CAGCTCATTTTTTAACCAATAGGCCGAAATCGGCAAAATCCCTTATAAATCAAAAGA
ATAGACCGAGATAGGGTTGAGTGTTGTTCCAGTTTGGAACAAGAGTCCACTATTAA
AGAACGTGGACTCCAACGTCAAAGGGCGAAAAACCGTCTATCAGGGCGATGGCCC
ACTACGTGAACCATCACCCTAATCAAGTTTTTTGGGGTCGAGGTGCCGTAAAGCAC
TAAATCGGAACCCTAAAGGGAGCCCCCGATTTAGAGCTTGACGGGGAAAGCCGGC
GAACGTGGCGAGAAAGGAAGGGAAGAAAGCGAAAGGAGCGGGCGCTAGGGCGC
TGGCAAGTGTAGCGGTCACGCTGCGCGTAACCACCACACCCGCCGCGCTTAATGC
GCCGCTACAGGGCGCGTCCCATTCGCCATTCAGGCTGCGCAACTGTTGGGAAGG
GCGATCGGTGCGGGCCTCTTCGCTATTACGCCAGCTGGCGAAAGGGGGATGTGC
TGCAAGGCGATTAAGTTGGGTAACGCCAGGGTTTTCCCAGTCACGACGTTGTAAAA
CGACGGCCAGTGAGCGCGCGTAATACGACTCACTATAGGGCGAATTGGGTACCG
GCATATGGTTCTTGACAGAGGTGTAAAAAGTACTCAAAAATTTTACTCAAGTGAAAG
TACAAGTACTTAGGGAAAATTTTACTCAATTAAAAGTAAAAGTATCTGGCTAGAATC
TTACTTGAGTAAAAGTAAAAAAGTACTCCATTAAAATTGTACTTGAGTATTAAGGAA
GTAAAAGTAAAAGCAAGAAAGATCGATCTCGAAGGATCTGGAGGCCACCATGGTG
TCGATAACTTCGTATAGCATACATTATACGAAGTTATCGTGCTCGACATTGATTATT
GACTAGTTATTAATAGTAATCAATTACGGGGTCATTAGTTCATAGCCCATATATGGA
GTTCCGCGTTACATAACTTACGGTAAATGGCCCGCCTGGCTGACCGCCCAACGAC
CCCCGCCCATTGACGTCAATAATGACGTATGTTCCCATAGTAACGCCAATAGGGAC
TTTCCATTGACGTCAATGGGTGGAGTATTTACGGTAAACTGCCCACTTGGCAGTAC
ATCAAGTGTATCATATGCCAAGTACGCCCCCTATTGACGTCAATGACGGTAAATGG
CCCGCCTGGCATTATGCCCAGTACATGACCTTATGGGACTTTCCTACTTGGCAGTA
CATCTACGTATTAGTCATCGCTATTACCATGGTCGAGGTGAGCCCCACGTTCTGCT
TCACTCTCCCCATCTCCCCCCCCTCCCCACCCCCAATTTTGTATTTATTTATTTTTTA
ATTATTTTGTGCAGCGATGGGGGCGGGGGGGGGGGGGGGGCGCGCGCCAGGCG
GGGCGGGGCGGGGCGAGGGGCGGGGCGGGGCGAGGCGGAGAGGTGCGGCGG
CAGCCAATCAGAGCGGCGCGCTCCGAAAGTTTCCTTTTATGGCGAGGCGGCGGC
GGCGGCGGCCCTATAAAAAGCGAAGCGCGCGGCGGGCGGGGAGTCGCTGCGAC
GCTGCCTTCGCCCCGTGCCCCGCTCCGCCGCCGCCTCGCGCCGCCCGCCCCGG
CTCTGACTGACCGCGTTACTCCCACAGGTGAGCGGGCGGGACGGCCCTTCTCCTC
CGGGCTGTAATTAGCGCTTGGTTTAATGACGGCTTGTTTCTTTTCTGTGGCTGCGT
GAAAGCCTTGAGGGGCTCCGGGAGGGCCCTTTGTGCGGGGGGAGCGGCTCGGG
GGGTGCGTGCGTGTGTGTGTGCGTGGGGAGCGCCGCGTGCGGCTCCGCGCTGC
CCGGCGGCTGTGAGCGCTGCGGGCGCGGCGCGGGGCTTTGTGCGCTCCGCAGT
GTGCGCGAGGGGAGCGCGGCCGGGGGCGGTGCCCCGCGGTGCGGGGGGGGCT
GCGAGGGGAACAAAGGCTGCGTGCGGGGTGTGTGCGTGGGGGGGTGAGCAGGG
GGTGTGGGCGCGTCGGTCGGGCTGCAACCCCCCCTGCACCCCCCTCCCCGAGTT
GCTGAGCACGGCCCGGCTTCGGGTGCGGGGCTCCGTACGGGGCGTGGCGCGGG
GCTCGCCGTGCCGGGCGGGGGGTGGCGGCAGGTGGGGGTGCCGGGCGGGGCG
GGGCCGCCTCGGGCCGGGGAGGGCTCGGGGGAGGGGCGCGGCGGCCCCCGGA
GCGCCGGCGGCTGTCGAGGCGCGGCGAGCCGCAGCCATTGCCTTTTATGGTAAT
CGTGCGAGAGGGCGCAGGGACTTCCTTTGTCCCAAATCTGTGCGGAGCCGAAATC
TGGGAGGCGCCGCCGCACCCCCTCTAGCGGGCGCGGGGCGAAGCGGTGCGGCG
CCGGCAGGAAGGAAATGGGCGGGGAGGGCCTTCGTGCGTCGCCGCGCCGCCGT
CCCCTTCTCCCTCTCCAGCCTCGGGGCTGTCCGCGGGGGGACGGCTGCCTTCGG
GGGGGACGGGGCAGGGCGGGGTTCGGCTTCTGGCGTGTGACCGGCGGCTCTAG
AGCCTCTGCTAACCATGTTCATGCCTTCTTCTTTTTCCTACAGCTCCTGGGCAACGT
GCTGGTTATTGTGCTGTCTCATCATTTTGGCAAAGAATTCCTCGAGCGGCCGCCAG
TGTGATGGATATCGGATCCGCTAGCGCTACTAACTTCAGCCTGCTGAAGCAGGCT
GGAGACGTGGAGGAGAACCCTGGACCTGGACCGGTCGCCACCATGGTGAGCAAG
GGCGAGGAGCTGTTCACCGGGGTGGTGCCCATCCTGGTCGAGCTGGACGGCGAC
GTAAACGGCCACAAGTTCAGCGTGTCCGGCGAGGGCGAGGGCGATGCCACCTAC
GGCAAGCTGACCCTGAAGTTCATCTGCACCACCGGCAAGCTGCCCGTGCCCTGG
CCCACCCTCGTGACCACCCTGACCTACGGCGTGCAGTGCTTCAGCCGCTACCCCG
ACCACATGAAGCAGCACGACTTCTTCAAGTCCGCCATGCCCGAAGGCTACGTCCA
GGAGCGCACCATCTTCTTCAAGGACGACGGCAACTACAAGACCCGCGCCGAGGT
GAAGTTCGAGGGCGACACCCTGGTGAACCGCATCGAGCTGAAGGGCATCGACTT
CAAGGAGGACGGCAACATCCTGGGGCACAAGCTGGAGTACAACTACAACAGCCAC
AACGTCTATATCATGGCCGACAAGCAGAAGAACGGCATCAAGGTGAACTTCAAGAT
CCGCCACAACATCGAGGACGGCAGCGTGCAGCTCGCCGACCACTACCAGCAGAA
CACCCCCATCGGCGACGGCCCCGTGCTGCTGCCCGACAACCACTACCTGAGCAC
CCAGTCCGCCCTGAGCAAAGACCCCAACGAGAAGCGCGATCACATGGTCCTGCTG
GAGTTCGTGACCGCCGCCGGGATCACTCTCGGCATGGACGAGCTGTACAAGTAAA
GCGGCCGCCACCGCGGTGGAGCTCGAATTAATTCATCGATGATGATCCAGACATG
ATAAGATACATTGATGAGTTTGGACAAACCACAACTAGAATGCAGTGAAAAAAATG
CTTTATTTGTGAAATTTGTGATGCTATTGCTTTATTTGTAACCATTATAAGCTGCAAT
AAACAAGTTAACAACAACAATTGCATTCATTTTATGTTTCAGGTTCAGGGGGAGGTG
TGGGAGGTTTTTTAAAGCAAGTAAAACCTCTACAAATGTGGTATGGCTGATTATGAT
CCTCTAGAGTCGGTGGGCCTCGGGGGCGGGTGCGGGGTCGGCGGGGCCGCCCC
GGGTGGCTTCGGTCGGAGCCATGGGGTCGTGCGCTCCTTTCGGTCGGGCGCTGC
GGGTCGTGGGGCGGGCGTCAGGCACCGGGCTTGCGGGTCATGCACCAGGTGCG
CGGTCCTTCGGGCACCTCGACGTCGGCGGTGACGGTGAAGCCGAGCCGCTCGTA
GAAGGGGAGGTTGCGGGGCGCGGAGGTCTCCAGGAAGGCGGGCACCCCGGCGC
GCTCGGCCGCCTCCACTCCGGGGAGCACGACGGCGCTGCCCAGACCCTTGCCCT
GGTGGTCGGGCGAGACGCCGACGGTGGCCAGGAACCACGCGGGCTCCTTGGGC
CGGTGCGGCGCCAGGAGGCCTTCCATCTGTTGCTGCGCGGCCAGCCGGGAACCG
CTCAACTCGGCCATGCGCGGGCCGATCTCGGCGAACACCGCCCCCGCTTCGACG
CTCTCCGGCGTGGTCCAGACCGCCACCGCGGCGCCGTCGTCCGCGACCCACACC
TTGCCGATGTCGAGCCCGACGCGCGTGAGGAAGAGTTCTTGCAGCTCGGTGACC
CGCTCGATGTGGCGGTCCGGGTCGACGGTGTGGCGCGTGGCGGGGTAGTCGGC
GAACGCGGCGGCGAGGGTGCGTACGGCCCGGGGGACGTCGTCGCGGGTGGCGA
GGCGCACCGTGGGCTTGTACTCGGTCATGGAAGGTCGTCTCCTTGTGAGGGGTCA
GGGGCGTGGGTCAGGGGATGGTGGCGGCACCGGTCGTGGCGGCCGACCTGCAG
GCATGCAAGCTTTTTGCAAAAGCCTAGGCCTCCAAAAAAGCCTCCTCACTACTTCT
GGAATAGCTCAGAGGCCGAGGCGGCCTCGGCCTCTGCATAAATAAAAAAAATTAG
TCAGCCATGGGGCGGAGAATGGGCGGAACTGGGCGGAGTTAGGGGCGGGATGG
GCGGAGTTAGGGGCGGGACTATGGTTGCTGACTAATTGAGATGCATGCTTTGCAT
ACTTCTGCCTGCTGGGGAGCCTGGGGACTTTCCACACCTGGTTGCTGACTAATTG
AGATGCATGCTTTGCATACTTCTGCCTGCTGGGGAGCCTGGGGACTTTCCACACC
CTAACTGACACACATTCCACAGAATTCAAGTGATCTCCAAAAAATAAGTACTTTTTG
ACTGTAAATAAAATTGTAAGGAGTAAAAAGTACTTTTTTTTCTAAAAAAATGTAATT
AAGTAAAAGTAAAAGTATTGATTTTTAATTGTACTCAAGTAAAGTAAAAATCCCCAA
AAATAATACTTAAGTACAGTAATCAAGTAAAATTACTCAAGTACTTTACACCTCTGG
TTCTTGACCCCCTACCTTCAGCAAGCCCAGCAGATCCGAGCTCCAGCTTTTGTTCCCT
TTAGTGAGGGTTAATTGCGCGCTTGGCGTAATCATGGTCATAGCTGTTTCCTGTGTG
AAATTGTTATCCGCTCACAATTCCACACAACATACGAGCCGGAAGCATAAAGTGTA
AAGCCTGGGGTGCCTAATGAGTGAGCTAACTCACATTAATTGCGTTGCGCTCACTG
CCCGCTTTCCAGTCGGGAAACCTGTCGTGCCAGCTGCATTAATGAATCGGCCAAC
GCGCGGGGAGAGGCGGTTTGCGTATTGGGCGCTCTTCCGCTTCCTCGCTCACTGA
CTCGCTGCGCTCGGTCGTTCGGCTGCGGCGAGCGGTATCAGCTCACTCAAAGGC
GGTAATACGGTTATCCACAGAATCAGGGGATAACGCAGGAAAGAACATGTGAGCA
AAAGGCCAGCAAAAGGCCAGGAACCGTAAAAAGGCCGCGTTGCTGGCGTTTTTCC
ATAGGCTCCGCCCCCCTGACGAGCATCACAAAAATCGACGCTCAAGTCAGAGGTG
GCGAAACCCGACAGGACTATAAAGATACCAGGCGTTTCCCCCTGGAAGCTCCCTC
GTGCGCTCTCCTGTTCCGACCCTGCCGCTTACCGGATACCTGTCCGCCTTTCTCC
CTTCGGGAAGCGTGGCGCTTTCTCATAGCTCACGCTGTAGGTATCTCAGTTCGGT
GTAGGTCGTTCGCTCCAAGCTGGGCTGTGTGCACGAACCCCCCGTTCAGCCCGAC
CGCTGCGCCTTATCCGGTAACTATCGTCTTGAGTCCAACCCGGTAAGACACGACTT
ATCGCCACTGGCAGCAGCCACTGGTAACAGGATTAGCAGAGCGAGGTATGTAGGC
GGTGCTACAGAGTTCTTGAAGTGGTGGCCTAACTACGGCTACACTAGAAGGACAG
TATTTGGTATCTGCGCTCTGCTGAAGCCAGTTACCTTCGGAAAAAGAGTTGGTAGC
TCTTGATCCGGCAAACAAACCACCGCTGGTAGCGGTGGTTTTTTTGTTTGCAAGCA
GCAGATTACGCGCAGAAAAAAAGGATCTCAAGAAGATCCTTTGATCTTTTCTACGG
GGTCTGACGCTCAGTGGAACGAAAACTCACGTTAAGGGATTTTGGTCATGAGATTA
TCAAAAAGGATCTTCACCTAGATCCTTTTAAATTAAAAATGAAGTTTTAAATCAATC
TAAAGTATATATGAGTAAACTTGGTCTGACAGTTACCAATGCTTAATCAGTGAGGCA
CCTATCTCAGCGATCTGTCTATTTCGTTCATCCATAGTTGCCTGACTCCCCGTCGTGT
AGATAACTACGATACGGGAGGGCTTACCATCTGGCCCCAGTGCTGCAATGATACC
GCGAGACCCACGCTCACCGGCTCCAGATTTATCAGCAATAAACCAGCCAGCCGGA
AGGGCCGAGCGCAGAAGTGGTCCTGCAACTTTATCCGCCTCCATCCAGTCTATTA
ATTGTTGCCGGGAAGCTAGAGTAAGTAGTTCGCCAGTTAATAGTTTGCGCAACGTT
GTTGCCATTGCTACAGGCATCGTGGTGTCACGCTCGTCGTTTGGTATGGCTTCATT
CAGCTCCGGTTCCCAACGATCAAGGCGAGTTACATGATCCCCCATGTTGTGCAAAA
AAGCGGTTAGCTCCTTCGGTCCTCCGATCGTTGTCAGAAGTAAGTTGGCCGCAGT
GTTATCACTCATGGTTATGGCAGCACTGCATAATTCTCTTACTGTCATGCCATCCGT
AAGATGCTTTTCTGTGACTGGTGAGTACTCAACCAAGTCATTCTGAGAATAGTGTAT
GCGGCGACCGAGTTGCTCTTGCCCGGCGTCAATACGGGATAATACCGCGCCACAT
AGCAGAACTTTAAAAGTGCTCATCATTGGAAAACGTTCTTCGGGGCGAAAACTCTC
AAGGATCTTACCGCTGTTGAGATCCAGTTCGATGTAACCCACTCGTGCACCCAACT
GATCTTCAGCATCTTTTACTTTCACCAGCGTTTCTGGGTGAGCAAAAACAGGAAGG
CAAAATGCCGCAAAAAAGGGAATAAGGGCGACACGGAAATGTTGAATACTCATACT
CTTCCTTTTTCAATATTATTGAAGCATTTATCAGGGTTATTGTCTCATGAGCGGATAC
ATATTTGAATGTATTTAGAAAAATAAACAAATAGGGGTTCCGCGCACATTTCCCCGA
AAAGTG
LDLRwt
(SEQ ID NO: 42)
ATGGGGCCCTGGGGCTGGAAATTGCGCTGGACCGTCGCCTTGCTCCTCGCCGCG
GCGGGGACTGCAGTGGGCGACAGATGCGAAAGAAACGAGTTCCAGTGCCAAGAC
GGGAAATGCATCTCCTACAAGTGGGTCTGCGATGGCAGCGCTGAGTGCCAGGATG
GCTCTGATGAGTCCCAGGAGACGTGCTTGTCTGTCACCTGCAAATCCGGGGACTT
CAGCTGTGGGGGCCGTGTCAACCGCTGCATTCCTCAGTTCTGGAGGTGCGATGGC
CAAGTGGACTGCGACAACGGCTCAGACGAGCAAGGCTGTCCCCCCAAGACGTGC
TCCCAGGACGAGTTTCGCTGCCACGATGGGAAGTGCATCTCTCGGCAGTTCGTCT
GTGACTCAGACCGGGACTGCTTGGACGGCTCAGACGAGGCCTCCTGCCCGGTGC
TCACCTGTGGTCCCGCCAGCTTCCAGTGCAACAGCTCCACCTGCATCCCCCAGCT
GTGGGCCTGCGACAACGACCCCGACTGCGAAGATGGCTCGGATGAGTGGCCGCA
GCGCTGTAGGGGTCTTTACGTGTTCCAAGGGGACAGTAGCCCCTGCTCGGCCTTC
GAGTTCCACTGCCTAAGTGGCGAGTGCATCCACTCCAGCTGGCGCTGTGATGGTG
GCCCCGACTGCAAGGACAAATCTGACGAGGAAAACTGCGCTGTGGCCACCTGTCG
CCCTGACGAATTCCAGTGCTCTGATGGAAACTGCATCCATGGCAGCCGGCAGTGT
GACCGGGAATATGACTGCAAGGACATGAGCGATGAAGTTGGCTGCGTTAATGTGA
CACTCTGCGAGGGACCCAACAAGTTCAAGTGTCACAGCGGCGAATGCATCACCCT
GGACAAAGTCTGCAACATGGCTAGAGACTGCCGGGACTGGTCAGATGAACCCATC
AAAGAGTGCGGGACCAACGAATGCTTGGACAACAACGGCGGCTGTTCCCACGTCT
GCAATGACCTTAAGATCGGCTACGAGTGCCTGTGCCCCGACGGCTTCCAGCTGGT
GGCCCAGCGAAGATGCGAAGATATCGATGAGTGTCAGGATCCCGACACCTGCAGC
CAGCTCTGCGTGAACCTGGAGGGTGGCTACAAGTGCCAGTGTGAGGAAGGCTTC
CAGCTGGACCCCCACACGAAGGCCTGCAAGGCTGTGGGCTCCATCGCCTACCTCT
TCTTCACCAACCGGCACGAGGTCAGGAAGATGACGCTGGACCGGAGCGAGTACA
CCAGCCTCATCCCCAACCTGAGGAACGTGGTCGCTCTGGACACGGAGGTGGCCA
GCAATAGAATCTACTGGTCTGACCTGTCCCAGAGAATGATCTGCAGCACCCAGCTT
GACAGAGCCCACGGCGTCTCTTCCTATGACACCGTCATCAGCAGAGACATCCAGG
CCCCCGACGGGCTGGCTGTGGACTGGATCCACAGCAACATCTACTGGACCGACTC
TGTCCTGGGCACTGTCTCTGTTGCGGATACCAAGGGCGTGAAGAGGAAAACGTTA
TTCAGGGAGAACGGCTCCAAGCCAAGGGCCATCGTGGTGGATCCTGTTCATGGCT
TCATGTACTGGACTGACTGGGGAACTCCCGCCAAGATCAAGAAAGGGGGCCTGAA
TGGTGTGGACATCTACTCGCTGGTGACTGAAAACATTCAGTGGCCCAATGGCATCA
CCCTAGATCTCCTCAGTGGCCGCCTCTACTGGGTTGACTCCAAACTTCACTCCATC
TCAAGCATCGATGTCAATGGGGGCAACCGGAAGACCATCTTGGAGGATGAAAAGA
GGCTGGCCCACCCCTTCTCCTTGGCCGTCTTTGAGGACAAAGTATTTTGGACAGAT
ATCATCAACGAAGCCATTTTCAGTGCCAACCGCCTCACAGGTTCCGATGTCAACTT
GTTGGCTGAAAACCTACTGTCCCCAGAGGATATGGTCCTCTTCCACAACCTCACCC
AGCCAAGAGGAGTGAACTGGTGTGAGAGGACCACCCTGAGCAATGGCGGCTGCC
AGTATCTGTGCCTCCCTGCCCCGCAGATCAACCCCCACTCGCCCAAGTTTACCTG
CGCCTGCCCGGACGGCATGCTGCTGGCCAGGGACATGAGGAGCTGCCTCACAGA
GGCTGAGGCTGCAGTGGCCACCCAGGAGACATCCACCGTCAGGCTAAAGGTCAG
CTCCACAGCCGTAAGGACACAGCACACAACCACCCGGCCTGTTCCCGACACCTCC
CGGCTGCCTGGGGCCACCCCTGGGCTCACCACGGTGGAGATAGTGACAATGTCT
CACCAAGCTCTGGGCGACGTTGCTGGCAGAGGAAATGAGAAGAAGCCCAGTAGC
GTGAGGGCTCTGTCCATTGTCCTCCCCATCGTGCTCCTCGTCTTCCTTTGCCTGGG
GGTCTTCCTTCTATGGAAGAACTGGCGGCTTAAGAACATCAACAGCATCAACTTTG
ACAACCCCGTCTATCAGAAGACCACAGAGGATGAGGTCCACATTTGCCACAACCA
GGACGGCTACAGCTACCCCTCGAGACAGATGGTCAGTCTGGAGGATGACGTGGCG
LDLRDup252 with surrounding region
(SEQ ID NO: 43)
CCCCCAAGACGTGCTCCCAGGACGAGTTTCGCTGCCACGATGGGAAGTGCATCTC
TCGGCAGTTCGTCTGTGACTCAGACCGGGACTGCTTGGACGGCTCAGACGAGGC
CTCCTGCCCGGTGCTCACCTGTGGTCCCGCCAGCTTCCAGTGCAACAGCTCCACC
TGCATCCCCCAGCTGTGGGCCTGCGACAACGACCCCGACTGCGAAGATGGCTCG
GAGGCTCGGATGAGTGGCCGCAGCGCTGTAGGGGTCTTTACGTGTTCCAAGGGG
ACAGTAGCCCCTGCTCGGCCTTCGAGTTCCACTGCCTAAGTGGCGAGTGCATCCA
CTCCAGCTGGCGCTGTGATGGTGGCCCCGACTGCAAGGACAAATCTGACGAGGA
AAACTGCG
LDLRDup254/255 with surrounding region
(SEQ ID NO: 44)
CCCCCAAGACGTGCTCCCAGGACGAGTTTCGCTGCCACGATGGGAAGTGCATCTC
TCGGCAGTTCGTCTGTGACTCAGACCGGGACTGCTTGGACGGCTCAGACGAGGC
CTCCTGCCCGGTGCTCACCTGTGGTCCCGCCAGCTTCCAGTGCAACAGCTCCACC
TGCATCCCCCAGCTGTGGGCCTGCGACAACGACCCCGACTGCGAAGATGGCTCG
GATGAGTGGCCGCAGCGCTGTAGGGGTCTTTACGTGTTCCAAGGGGACAGTAGC
CCCTGCTCGGCCTTCGAGTTCCACTGCCTAAGTGGCGAGTGCATCCACTCCAGCT
GGCGCTGTGATGGTGGCCCCGACTGCAAGGACAAATCTGACAGGACAAATCTGAC
GAGGAAAACTGCGCTGTGGCCACCTGTCGCCCTGACGAATTCCAGTGCTCTGATG
GAAACTGCATCCATG
LDLRDup258 with surrounding region
(SEQ ID NO: 45)
CCCCCAAGACGTGCTCCCAGGACGAGTTTCGCTGCCACGATGGGAAGTGCATCTC
TCGGCAGTTCGTCTGTGACTCAGACCGGGACTGCTTGGACGGCTCAGACGAGGC
CTCCTGCCCGGTGCTCACCTGTGGTCCCGCCAGCTTCCAGTGCAACAGCTCCACC
TGCATCCCCCAGCTGTGGGCCTGCGACAACGACCCCGACTGCGAAGATGGCTCG
GATGAGTGGCCGCAGCGCTGTAGGGGTCTTTACGTGTTCCAAGGGGACAGTAGC
CCCTGCTCGGCCTTCGAGTTCCACTGCCTAAGTGGCGAGTGCATCCACTCCAGCT
GGCGCTGTGATGGTGGCCCCGACTGCAAGGACAAATCTGAGGACAAATCTGACGA
GGAAAACTGCGCTGTGGCCACCTGTCGCCCTGACGAATTCCAGTGCTCTGATGGA
AACTGCATCCATG
LDLRDup261 with surrounding region
(SEQ ID NO: 46)
CCCCCAAGACGTGCTCCCAGGACGAGTTTCGCTGCCACGATGGGAAGTGCATCTC
TCGGCAGTTCGTCTGTGACTCAGACCGGGACTGCTTGGACGGCTCAGACGAGGC
CTCCTGCCCGGTGCTCACCTGTGGTCCCGCCAGCTTCCAGTGCAACAGCTCCACC
TGCATCCCCCAGCTGTGGGCCTGCGACAACGACCCCGACTGCGAAGATGGCTCG
GATGAGTGGCCGCAGCGCTGTAGGGGTCTTTACGTGTTCCAAGGGGACAGTAGC
CCCTGCTCGGCCTTCGAGTTCCACTGCCTAAGTGGCGAGTGCATCCACTCCAGCT
GGCGCTGTGATGGTGGCCCCGACTGCAAGGACAAATCTGACGACAAATCTGACGA
GGAAAACTGCGCTGTGGCCACCTGTCGCCCTGACGAATTCCAGTGCTCTGATGGA
AACTGCATCCATG
LDLRDup264 with surrounding region
(SEQ ID NO: 47)
CTTCATGTACTGGACTGACTGGGGAACTCCCGCCAAGATCAAGAAAGGGGGCCTG
AATGGTGTGGACATCTACTCGCTGGTGAGCTGGTGACTGAAAACATTCAGTGGCC
CAATGGCATCACCCTAG
GAAwt
(SEQ ID NO: 48)
ATGGGAGTGAGGCACCCGCCCTGCTCCCACCGGCTCCTGGCCGTCTGCGCCCTC
GTGTCCTTGGCAACCGCTGCACTCCTGGGGCACATCCTACTCCATGATTTCCTGCT
GGTTCCCCGAGAGCTGAGTGGCTCCTCCCCAGTCCTGGAGGAGACTCACCCAGCT
CACCAGCAGGGAGCCAGCAGACCAGGGCCCCGGGATGCCCAGGCACACCCCGG
CCGTCCCAGAGCAGTGCCCACACAGTGCGACGTCCCCCCCAACAGCCGCTTCGA
TTGCGCCCCTGACAAGGCCATCACCCAGGAACAGTGCGAGGCCCGCGGCTGTTG
CTACATCCCTGCAAAGCAGGGGCTGCAGGGAGCCCAGATGGGGCAGCCCTGGTG
CTTCTTCCCACCCAGCTACCCCAGCTACAAGCTGGAGAACCTGAGCTCCTCTGAAA
TGGGCTACACGGCCACCCTGACCCGTACCACCCCCACCTTCTTCCCCAAGGACAT
CCTGACCCTGCGGCTGGACGTGATGATGGAGACTGAGAACCGCCTCCACTTCACG
ATCAAAGATCCAGCTAACAGGCGCTACGAGGTGCCCTTGGAGACCCCGCATGTCC
ACAGCCGGGCACCGTCCCCACTCTACAGCGTGGAGTTCTCCGAGGAGCCCTTCG
GGGTGATCGTGCGCCGGCAGCTGGACGGCCGCGTGCTGCTGAACACGACGGTG
GCGCCCCTGTTCTTTGCGGACCAGTTCCTTCAGCTGTCCACCTCGCTGCCCTCGC
AGTATATCACAGGCCTCGCCGAGCACCTCAGTCCCCTGATGCTCAGCACCAGCTG
GACCAGGATCACCCTGTGGAACCGGGACCTTGCGCCCACGCCCGGTGCGAACCT
CTACGGGTCTCACCCTTTCTACCTGGCGCTGGAGGACGGCGGGTCGGCACACGG
GGTGTTCCTGCTAAACAGCAATGCCATGGATGTGGTCCTGCAGCCGAGCCCTGCC
CTTAGCTGGAGGTCGACAGGTGGGATCCTGGATGTCTACATCTTCCTGGGCCCAG
AGCCCAAGAGCGTGGTGCAGCAGTACCTGGACGTTGTGGGATACCCGTTCATGCC
GCCATACTGGGGCCTGGGCTTCCACCTGTGCCGCTGGGGCTACTCCTCCACCGCT
ATCACCCGCCAGGTGGTGGAGAACATGACCAGGGCCCACTTCCCCCTGGACGTC
CAGTGGAACGACCTGGACTACATGGACTCCCGGAGGGACTTCACGTTCAACAAGG
ATGGCTTCCGGGACTTCCCGGCCATGGTGCAGGAGCTGCACCAGGGCGGCCGGC
GCTACATGATGATCGTGGATCCTGCCATCAGCAGCTCGGGCCCTGCCGGGAGCTA
CAGGCCCTACGACGAGGGTCTGCGGAGGGGGGTTTTCATCACCAACGAGACCGG
CCAGCCGCTGATTGGGAAGGTATGGCCCGGGTCCACTGCCTTCCCCGACTTCACC
AACCCCACAGCCCTGGCCTGGTGGGAGGACATGGTGGCTGAGTTCCATGACCAG
GTGCCCTTCGACGGCATGTGGATTGACATGAACGAGCCTTCCAACTTCATCAGGG
GCTCTGAGGACGGCTGCCCCAACAATGAGCTGGAGAACCCACCCTACGTGCCTG
GGGTGGTTGGGGGGACCCTCCAGGCGGCCACCATCTGTGCCTCCAGCCACCAGT
TTCTCTCCACACACTACAACCTGCACAACCTCTACGGCCTGACCGAAGCCATCGCC
TCCCACAGGGCGCTGGTGAAGGCTCGGGGGACACGCCCATTTGTGATCTCCCGC
TCGACCTTTGCTGGCCACGGCCGATACGCCGGCCACTGGACGGGGGACGTGTGG
AGCTCCTGGGAGCAGCTCGCCTCCTCCGTGCCAGAAATCCTGCAGTTTAACCTGC
TGGGGGTGCCTCTGGTCGGGGCCGACGTCTGCGGCTTCCTGGGCAACACCTCAG
AGGAGCTGTGTGTGCGCTGGACCCAGCTGGGGGCCTTCTACCCCTTCATGCGGAA
CCACAACAGCCTGCTCAGTCTGCCCCAGGAGCCGTACAGCTTCAGCGAGCCGGC
CCAGCAGGCCATGAGGAAGGCCCTCACCCTGCGCTACGCACTCCTCCCCCACCT
CTACACACTGTTCCACCAGGCCCACGTCGCGGGGGAGACCGTGGCCCGGCCCCT
CTTCCTGGAGTTCCCCAAGGACTCTAGCACCTGGACTGTGGACCACCAGCTCCTG
TGGGGGGAGGCCCTGCTCATCACCCCAGTGCTCCAGGCCGGGAAGGCCGAAGTG
ACTGGCTACTTCCCCTTGGGCACATGGTACGACCTGCAGACGGTGCCAGTAGAGG
CCCTTGGCAGCCTCCCACCCCCACCTGCAGCTCCCCGTGAGCCAGCCATCCACAG
CGAGGGGCAGTGGGTGACGCTGCCGGCCCCCCTGGACACCATCAACGTCCACCT
CCGGGCTGGGTACATCATCCCCCTGCAGGGCCCTGGCCTCACAACCACAGAGTC
CCGCCAGCAGCCCATGGCCCTGGCTGTGGCCCTGACCAAGGGTGGGGAGGCCC
GAGGGGAGCTGTTCTGGGACGATGGAGAGAGCCTGGAAGTGCTGGAGCGAGGG
GCCTACACACAGGTCATCTTCCTGGCCAGGAATAACACGATCGTGAATGAGCTGG
TACGTGTGACCAGTGAGGGAGCTGGCCTGCAGCTGCAGAAGGTGACTGTCCTGG
GCGTGGCCACGGCGCCCCAGCAGGTCCTCTCCAACGGTGTCCCTGTCTCCAACTT
CACCTACAGCCCCGACACCAAGGTCCTGGACATCTGTGTCTCGCTGTTGATGGGA
GAGCAGTTTCTCGTCAGCTGGTGT
GAADup327/328
(SEQ ID NO: 49)
ATGGGAGTGAGGCACCCGCCCTGCTCCCACCGGCTCCTGGCCGTCTGCGCCCTC
GTGTCCTTGGCAACCGCTGCACTCCTGGGGCACATCCTACTCCATGATTTCCTGCT
GGTTCCCCGAGAGCTGAGTGGCTCCTCCCCAGTCCTGGAGGAGACTCACCCAGCT
CACCAGCAGGGAGCCAGCAGACCAGGGCCCCGGGATGCCCAGGCACACCCCGG
CCGTCCCAGAGCAGTGCCCACACAGTGCGACGTCCCCCCCAACAGCCGCTTCGA
TTGCGCCCCTGACAAGGCCATCACCCAGGAACAGTGCGAGGCCCGCGGCTGTTG
CTACATCCCTGCAAAGCAGGGGCTGCAGGGAGCCCAGATGGGGCAGCCCTGGTG
CTTCTTCCCACCCAGCTACCCCAGCTACAAGCTGGAGAACCTGAGCTCCTCTGAAA
TGGGCTACACGGCCACCCTGACCCGTACCACCCCCACCTTCTTCCCCAAGGACAT
CCTGACCCTGCGGCTGGACGTGATGATGGAGACTGAGAACCGCCTCCACTTCACG
ATCAAAGATCCAGCTAACAGGCGCTACGAGGTGCCCTTGGAGACCCCGCATGTCC
ACAGCCGGGCACCGTCCCCACTCTACAGCGTGGAGTTCTCCGAGGAGCCCTTCG
GGGTGATCGTGCGCCGGCAGCTGGACGGCCGCGTGCTGCTGAACACGACGGTG
GCGCCCCTGTTCTTTGCGGACCAGTTCCTTCAGCTGTCCACCTCGCTGCCCTCGC
AGTATATCACAGGCCTCGCCGAGCACCTCAGTCCCCTGATGCTCAGCACCAGCTG
GACCAGGATCACCCTGTGGAACCGGGACCTTGCGCCCACGCCCGGTGCGAACCT
CTACGGGTCTCACCCTTTCTACCTGGCGCTGGAGGACGGCGGGTCGGCACACGG
GGTGTTCCTGCTAAACAGCAATGCCATGGATGTGGTCCTGCAGCCGAGCCCTGCC
CTTAGCTGGAGGTCGACAGGTGGGATCCTGGATGTCTACATCTTCCTGGGCCCAG
AGCCCAAGAGCGTGGTGCAGCAGTACCTGGACGTTGTGGGATACCCGTTCATGCC
GCCATACTGGGGCCTGGGCTTCCACCTGTGCCGCTGGGGCTACTCCTCCACCGCT
ATCACCCGCCAGGTGGTGGAGAACATGACCAGGGCCCACTTCCCCCTGGACGTC
CAGTGGAACGACCTGGACTACATGGACTCCCGGAGGGACTTCACGTTCAACAAGG
ATGGCTTCCGGGACTTCCCGGCCATGGTGCAGGAGCTGCACCAGGGCGGCCGGC
GCTACATGATGATCGTGGATCCTGCCATCAGCAGCTCGGGCCCTGCCGGGAGCTA
CAGGCCCTACGACGAGGGTCTGCGGAGGGGGGTTTTCATCACCAACGAGACCGG
CCAGCCGCTGATTGGGAAGGTATGGCCCGGGTCCACTGCCTTCCCCGACTTCACC
AACCCCACAGCCCTGGCCTGGTGGGAGGACATGGTGGCTGAGTTCCATGACCAG
GTGCCCTTCGACGGCATGTGGATTGACATGAACGAGCCTTCCAACTTCATCAGGG
GCTCTGAGGACGGCTGCCCCAACAATGAGCTGGAGAACCCACCCTACGTGCCTG
GGGTGGTTGGGGGGACCCTCCAGGCGGCCACCATCTGTGCCTCCAGCCACCAGT
TTCTCTCCACACACTACAACCTGCACAACCTCTACGGCCTGACCGAAGCCATCGCC
TCCCACAGGGCGCTGGTGAAGGCTCGGGGGACACGCCCATTTGTGATCTCCCGC
TCGACCTTTGCTGGCCACGGCCGATACGCCGGCCACTGGACGGGGGACGTGTGG
AGCTCCTGGGAGCAGCTCGCCTCCTCCGTGCCAGAAATCCTGCAGTTTAACCTGC
TGGGGGTGCCTCTGGTCGGGGCCGACGTCTGCGGCTTCCTGGGCAACACCTCAG
AGGAGCTGTGTGTGCGCTGGACCCAGCTGGGGGCCTTCTACCCCTTCATGCGGAA
CCACAACAGCCTGCTCAGTCTGCCCCAGGAGCCGTACAGCTTCAGCGAGCCGGC
CCAGCAGGCCATGAGGAAGGCCCTCACCCTGCGCTACGCACTCCTCCCCCACCT
CTACACACTGTTCCACCAGGCCCACGTCGCGGGGGAGACCGTGGCCCGGCCCCT
CTTCCTGGAGTTCCCCAAGGACTCTAGCACCTGGACTGTGGACCACCAGCTCCTG
TGGGGGGAGGCCCTGCTCATCACCCCAGTGCTCCAGGCCGGGAAGGCCGAAGTG
ACTGGCTACTTCCCCTTGGGCACATGGTACGACCTGCAGACGGTGCCAGTAGAGG
CCCTTGGCAGCCTCCCACCCCCACCTGCAGCTCCCCGTGAGCCAGCCATCCACAG
CGAGGGGCAGTGGGTGACGCTGCCGGCCCCCCTGGACACCATCAACGTCCACCT
CCGGGCTGGGTACATCATCCCCCTGCAGGGCCCTGGCCTCACAACCACAGAGTC
CCGCCAGCAGCCCATGGCCCTGGCTGTGGCCCTGACCAAGGGTGGGGAGGCCC
GAGGGGAGCTGTTCTGGGACGATGGAGAGAGCCTGGAAGTGCTGGAGCGAGGG
GCCTACACACAGGTCATCTTCCTGGCCAGGAATAACACGATCGTGAATGAGCTGG
TACGTGTGACCAGTGAGGGAGCTGGCCTGCAGCTGCAGAAGGTGACTGCAGAAG
GTGACTGTCCTGGGCGTGGCCACGGCGCCCCAGCAGGTCCTCTCCAACGGTGTC
CCTGTCTCCAACTTCACCTACAGCCCCGACACCAAGGTCCTGGACATCTGTGTCTC
GCTGTTGATGGGAGAGCAGTTTCTCGTCAGCTGGTGT
GLB1wt
(SEQ ID NO: 50)
ATGCCGGGGTTCCTGGTTCGCATCCTCCCTCTGTTGCTGGTTCTGCTGCTTCTGG
GCCCTACGCGCGGCTTGCGCAATGCCACCCAGAGGATGTTTGAAATTGACTATAG
CCGGGACTCCTTCCTCAAGGATGGCCAGCCATTTCGCTACATCTCAGGAAGCATTC
ACTACTCCCGTGTGCCCCGCTTCTACTGGAAGGACCGGCTGCTGAAGATGAAGAT
GGCTGGGCTGAACGCCATCCAGACGTATGTGCCCTGGAACTTTCATGAGCCCTGG
CCAGGACAGTACCAGTTTTCTGAGGACCATGATGTGGAATATTTTCTTCGGCTGGC
TCATGAGCTGGGACTGCTGGTTATCCTGAGGCCCGGGCCCTACATCTGTGCAGAG
TGGGAAATGGGAGGATTACCTGCTTGGCTGCTAGAGAAAGAGTCTATTCTTCTCCG
CTCCTCCGACCCAGATTACCTGGCAGCTGTGGACAAGTGGTTGGGAGTCCTTCTG
CCCAAGATGAAGCCTCTCCTCTATCAGAATGGAGGGCCAGTTATAACAGTGCAGG
TTGAAAATGAATATGGCAGCTACTTTGCCTGTGATTTTGACTACCTGCGCTTCCTGC
AGAAGCGCTTTCGCCACCATCTGGGGGATGATGTGGTTCTGTTTACCACTGATGGA
GCACATAAAACATTCCTGAAATGTGGGGCCCTGCAGGGCCTCTACACCACGGTGG
ACTTTGGAACAGGCAGCAACATCACAGATGCTTTCCTAAGCCAGAGGAAGTGTGA
GCCCAAAGGACCCTTGATCAATTCTGAATTCTATACTGGCTGGCTAGATCACTGGG
GCCAACCTCACTCCACAATCAAGACCGAAGCAGTGGCTTCCTCCCTCTATGATATA
CTTGCCCGTGGGGCGAGTGTGAACTTGTACATGTTTATAGGTGGGACCAATTTTGC
CTATTGGAATGGGGCCAACTCACCCTATGCAGCACAGCCCACCAGCTACGACTAT
GATGCCCCACTGAGTGAGGCTGGGGACCTCACTGAGAAGTATTTTGCTCTGCGAA
ACATCATCCAGAAGTTTGAAAAAGTACCAGAAGGTCCTATCCCTCCATCTACACCA
AAGTTTGCATATGGAAAGGTCACTTTGGAAAAGTTAAAGACAGTGGGAGCAGCTCT
GGACATTCTGTGTCCCTCTGGGCCCATCAAAAGCCTTTATCCCTTGACATTTATCCA
GGTGAAACAGCATTATGGGTTTGTGCTGTACCGGACAACACTTCCTCAAGATTGCA
GCAACCCAGCACCTCTCTCTTCACCCCTCAATGGAGTCCACGATCGAGCATATGTT
GCTGTGGATGGGATCCCCCAGGGAGTCCTTGAGCGAAACAATGTGATCACTCTGA
ACATAACAGGGAAAGCTGGAGCCACTCTGGACCTTCTGGTAGAGAACATGGGACG
TGTGAACTATGGTGCATATATCAACGATTTTAAGGGTTTGGTTTCTAACCTGACTCT
CAGTTCCAATATCCTCACGGACTGGACGATCTTTCCACTGGACACTGAGGATGCAG
TGTGCAGCCACCTGGGGGGCTGGGGACACCGTGACAGTGGCCACCATGATGAAG
CCTGGGCCCACAACTCATCCAACTACACGCTCCCGGCCTTTTATATGGGGAACTTC
TCCATTCCCAGTGGGATCCCAGACTTGCCCCAGGACACCTTTATCCAGTTTCCTGG
ATGGACCAAGGGCCAGGTCTGGATTAATGGCTTTAACCTTGGCCGCTATTGGCCA
GCCCGGGGCCCTCAGTTGACCTTGTTTGTGCCCCAGCACATCCTGATGACCTCGG
CCCCAAACACCATCACCGTGCTGGAACTGGAGTGGGCACCCTGCAGCAGTGATGA
TCCAGAACTATGTGCTGTGACGTTCGTGGACAGGCCAGTTATTGGCTCATCTGTGA
CCTACGATCATCCCTCCAAACCTGTTGAAAAAAGACTCATGCCCCCACCCCCGCAA
AAAAACAAAGATTCATGGCTGGACCATGTA
GLB1Dup84
(SEQ ID NO: 51)
ATGCCGGGGTTCCTGGTTCGCATCCTCCCTCTGTTGCTGGTTCTGCTGCTTCTGG
GCCCTACGCGCGGCTTGCGCAATGCCACCCAGAGGATGTTTGAAATTGACTATAG
CCGGGACTCCTTCCTCAAGGATGGCCAGCCATTTCGCTACATCTCAGGAAGCATTC
ACTACTCCCGTGTGCCCCGCTTCTACTGGAAGGACCGGCTGCTGAAGATGAAGAT
GGCTGGGCTGAACGCCATCCAGACGTATGTGCCCTGGAACTTTCATGAGCCCTGG
CCAGGACAGTACCAGTTTTCTGAGGACCATGATGTGGAATATTTTCTTCGGCTGGC
TCATGAGCTGGGACTGCTGGTTATCCTGAGGCCCGGGCCCTACATCTGTGCAGAG
TGGGAAATGGGAGGATTACCTGCTTGGCTGCTAGAGAAAGAGTCTATTCTTCTCCG
CTCCTCCGACCCAGATTACCTGGCAGCTGTGGACAAGTGGTTGGGAGTCCTTCTG
CCCAAGATGAAGCCTCTCCTCTATCAGAATGGAGGGCCAGTTATAACAGTGCAGG
TTGAAAATGAATATGGCAGCTACTTTGCCTGTGATTTTGACTACCTGCGCTTCCTGC
AGAAGCGCTTTCGCCACCATCTGGGGGATGATGTGGTTCTGTTTACCACTGATGGA
GCACATAAAACATTCCTGAAATGTGGGGCCCTGCAGGGCCTCTACACCACGGTGG
ACTTTGGAACAGGCAGCAACATCACAGATGCTTTCCTAAGCCAGAGGAAGTGTGA
GCCCAAAGGACCCTTGATCAATTCTGAATTCTATACTGGCTGGCTAGATCACTGGG
GCCAACCTCACTCCACAATCAAGACCGAAGCAGTGGCTTCCTCCCTCTATGATATA
CTTGCCCGTGGGGCGAGTGTGAACTTGTACATGTTTATAGGTGGGACCAATTTTGC
CTATTGGAATGGGGCCAACTCACCCTATGCAGCACAGCCCACCAGCTACGACTAT
GATGCCCCACTGAGTGAGGCTGGGGACCTCACTGAGAAGTATTTTGCTCTGCGAA
ACATCATCCAGAAGTTTGAAAAAGTACCAGAAGGTCCTATCCCTCCATCTACACCA
AAGTTTGCATATGGAAAGGTCACTTTGGAAAAGTTAAAGACAGTGGGAGCAGCTCT
GGACATTCTGTGTCCCTCTGGGCCCATCAAAAGCCTTTATCCCTTGACATTTATCCA
GGTGAAACAGCATTATGGGTTTGTGCTGTACCGGACAACACTTCCTCAAGATTGCA
GCAACCCAGCACCTCTCTCTTCACCCCTCAATGGAGTCCACGATCGAGCATATGTT
GCTGTGGATGGGATCCCCCAGGGAGTCCTTGAGCGAAACAATGTGATCACTCTGA
ACATAACAGGGAAAGCTGGAGCCACTCTGGACCTTCTGGTAGAGAACATGGGACG
TGTGAACTATGGTGCATATATGGTGCATATATCAACGATTTTAAGGGTTTGGTTTCT
AACCTGACTCTCAGTTCCAATATCCTCACGGACTGGACGATCTTTCCACTGGACAC
TGAGGATGCAGTGTGCAGCCACCTGGGGGGCTGGGGACACCGTGACAGTGGCCA
CCATGATGAAGCCTGGGCCCACAACTCATCCAACTACACGCTCCCGGCCTTTTATA
TGGGGAACTTCTCCATTCCCAGTGGGATCCCAGACTTGCCCCAGGACACCTTTATC
CAGTTTCCTGGATGGACCAAGGGCCAGGTCTGGATTAATGGCTTTAACCTTGGCC
GCTATTGGCCAGCCCGGGGCCCTCAGTTGACCTTGTTTGTGCCCCAGCACATCCT
GATGACCTCGGCCCCAAACACCATCACCGTGCTGGAACTGGAGTGGGCACCCTG
CAGCAGTGATGATCCAGAACTATGTGCTGTGACGTTCGTGGACAGGCCAGTTATT
GGCTCATCTGTGACCTACGATCATCCCTCCAAACCTGTTGAAAAAAGACTCATGCC
CCCACCCCCGCAAAAAAACAAAGATTCATGGCTGGACCATGTA
PORCNwt
(SEQ ID NO: 52)
ATGGCCACCTTTAGCCGCCAGGAATTTTTCCAGCAGCTACTGCAAGGCTGTCTCCT
GCCTACTGCCCAGCAGGGCCTTGACCAGATCTGGCTGCTCCTTGCCATCTGCCTC
GCCTGCCGCCTCCTCTGGAGGCTCGGGTTGCCATCCTACCTGAAGCATGCAAGCA
CCGTGGCAGGCGGGTTCTTCAGCCTCTACCACTTCTTCCAGCTGCACATGGTTTG
GGTCGTGCTGCTCAGCCTCCTGTGCTACCTCGTGCTGTTCCTCTGCCGACATTCCT
CCCATCGAGGCGTCTTCCTATCCGTCACCATCCTCATCTACCTACTCATGGGTGAG
ATGCACATGGTAGACACCGTGACATGGCACAAGATGCGAGGGGCACAGATGATTG
TGGCCATGAAGGCAGTGTCTCTGGGCTTCGACCTGGACCGGGGCGAGGTGGGTA
CGGTGCCCTCGCCAGTGGAGTTCATGGGCTACCTCTACTTCGTGGGCACCATCGT
CTTCGGGCCCTGGATATCCTTCCACAGCTACCTACAAGCTGTCCAAGGCCGCCCA
CTGAGCTGCCGGTGGCTGCAGAAGGTGGCCCGGAGCCTGGCACTGGCCCTGCTG
TGCCTTGTGCTGTCCACTTGCGTGGGCCCCTACCTCTTCCCGTACTTCATCCCCCT
CAACGGTGACCGCCTCCTTCGCAAGGGCACCATGGTAAGGTGGCTGCGAGCCTA
CGAGAGTGCTGTCTCCTTCCACTTCAGCAACTATTTTGTGGGCTTTCTTTCCGAGG
CCACGGCCACGTTGGCGGGGGCTGGCTTTACCGAGGAGAAGGATCACCTGGAAT
GGGACCTGACGGTGTCCAAGCCACTGAATGTGGAGCTGCCTCGGTCAATGGTGG
AAGTTGTCACAAGCTGGAACCTGCCCATGTCTTATTGGCTAAATAACTATGTTTTCA
AGAATGCTCTCCGCCTGGGGACCTTCTCGGCTGTGCTGGTCACCTATGCAGCCAG
CGCCCTCCTACATGGCTTCAGTTTCCACCTGGCTGCGGTCCTGCTGTCCCTGGCT
TTTATCACTTACGTGGAGCATGTCCTCCGGAAGCGCCTGGCTCGGATCCTCAGTG
CCTGTGTCTTGTCAAAGCGGTGCCCGCCAGACTGTTCGCACCAGCATCGCTTGGG
CCTGGGGGTGCGAGCCTTAAACTTGCTCTTTGGAGCTCTGGCCATCTTCCACCTG
GCCTACCTGGGCTCCCTGTTTGATGTCGATGTGGATGACACCACAGAGGAGCAGG
GCTACGGCATGGCATACACTGTCCACAAGTGGTCAGAGCTCAGCTGGGCCAGTCA
CTGGGTCACTTTTGGATGCTGGATCTTCTACCGTCTCATAGGC
PORCNDup20
(SEQ ID NO: 53)
ATGGCCACCTTTAGCCGCCAGGAATTTTTCCAGCAGCTACTGCAAGGCTGTCTCCT
GCCTACTGCCCAGCAGGGCCTTGACCAGATCTGGCTGCTCCTTGCCATCTGCCTC
GCCTGCCGCCTCCTCTGGAGGCTCGGGTTGCCATCCTACCTGAAGCATGCAAGCA
CCGTGGCAGGCGGGTTCTTCAGCCTCTACCACTTCTTCCAGCTGCACATGGTTTG
GGTCGTGCTGCTCAGCCTCCTGTGCTACCTCGTGCTGTTCCTCTGCCGACATTCCT
CCCATCGAGGCGTCTTCCTATCCGTCACCATCCTCATCTACCTACTCATGGGTGAG
ATGCACATGGTAGACACCGTGACATGGCACAAGATGCGAGGGGCACAGATGATTG
TGGCCATGAAGGCAGTGTCTCTGGGCTTCGACCTGGACCGGGGCGAGGTGGGTA
CGGTGCCCTCGCCAGTGGAGTTCATGGGCTACCTCTACTTCGTGGGCACCATCGT
CTTCGGGCCCTGGATATCCTTCCACAGCTACCTACAAGCTGTCCAAGGCCGCCCA
CTGAGCTGCCGGTGGCTGCAGAAGGTGGCCCGGAGCCTGGCACTGGCCCTGCTG
TGCCTTGTGCTGTCCACTTGCGTGGGCCCCTACCTCTTCCCGTACTTCATCCCCCT
CAACGGTGACCGCCTCCTTCGCAAGGGCACCATGGTAAGGTGGCTGCGAGCCTA
CGAGAGTGCTGTCTCCTTCCACTTCAGCAACTATTTTGTGGGCTTTCTTTCCGAGG
CCACGGCCACGTTGGCGGGGGCTGGCTTTACCGAGGAGAAGGATCACCTGGAAT
GGGACCTGACGGTGTCCAAGCCACTGAATGTGGAGCTGCCTCGGTCAATGGTGG
AAGTTGTCACAAGCTGGAACCTGCCCATGTCTTATTGGCTAAATAACTATGTTTTCA
AGAATGCTCTCCGCCTGGGGACCTTCTCGGCTGTGCTGGTCACCTATGCAGCCAG
CGCCCTCCTACATGGCTTCAGTTTCCACCTGGCTGCGGTCCTGCTGTCCCTGGCT
TTTATCCCTGGCTTTTATCACTTACGTGGAGCATGTCCTCCGGAAGCGCCTGGCTC
GGATCCTCAGTGCCTGTGTCTTGTCAAAGCGGTGCCCGCCAGACTGTTCGCACCA
GCATCGCTTGGGCCTGGGGGTGCGAGCCTTAAACTTGCTCTTTGGAGCTCTGGCC
ATCTTCCACCTGGCCTACCTGGGCTCCCTGTTTGATGTCGATGTGGATGACACCAC
AGAGGAGCAGGGCTACGGCATGGCATACACTGTCCACAAGTGGTCAGAGCTCAG
CTGGGCCAGTCACTGGGTCACTTTTGGATGCTGGATCTTCTACCGTCTCATAGGC

### Executive Summary

[0508] It was found that template-free DNA repair of Cas9-cleaved and Cpf1-cleaved DNA produces a predictable set of repair genotypes that can result in the gain-of-function repair of human disease mutations. Contrary to the assumption that end-joining following double-strand breaks is random and difficult to harness for applications beyond gene disruption, here it is shown that template-free end-joining repair of DNA cleaved by CRISPR-associated nucleases produces a predictable set of repair genotypes. A library of 2000 guide RNAs paired with target DNA sites was constructed, and they were integrated into mouse and human genomes, applied Cas9, and performed high-throughput sequencing of repair genotypes. Data from this assay are consistent with results from 98 endogenous loci. Building upon prior work, it is shown that the majority of repair genotypes in cells with saturated exposure to both CRISPR-Cas9 and Cpf1 are deletions associated with sequence microhomology. Using 1,588 sequence contexts from the data, CRISPR-Texture, a machine learning method that accurately predicted the frequencies of template-free Cas9-mediated microhomology-associated deletions as well as 1 bp insertions, was trained. On 282 held-out sequence contexts, CRISPR-Texture predicted frameshift rates more accurately than published methods and accurately predicted the statistical entropy of repair product distributions. Applied to the human genome, CRISPR-Texture identified an appreciable fraction of Cas9 target sites supporting high-precision repair distributions that are dominated by a single genotype. Further, it was found that a class of human disease-associated micro-duplication mutations can be repaired to wildtype at high frequency by template-free Cas9 nuclease editing and used the assay to validate hundreds of such alleles. Template-free Cas9 nuclease-mediated rescue of pathogenic LDLR alleles to wildtype phenotype in cellular models was also validated. This work establishes a strategy for predicting the outcomes of template-free end-joining and demonstrates that CRISPR editing can also mediate efficient gain-of-function editing at certain disease alleles without homology-directed repair.

### REFERENCES

[0509] 1. Cong, L. et al. Multiplex Genome Engineering Using CRISPR/Cas Systems. Science 339, 819 (2013).
[0510] 2. Mali, P. et al. RNA-Guided Human Genome Engineering via Cas9. Science 339, 823-826 (2013).
[0511] 3. Jinek, M. et al. RNA-programmed genome editing in human cells. eLife 2, e00471 (2013).
[0512] 4. Doench, J. G. et al. Optimized sgRNA design to maximize activity and minimize off-target effects of CRISPR-Cas9. Nat. Biotechnol. 34, 1-12 (2016).
[0513] 5. Kleinstiver, B. P. et al. High-fidelity CRISPR-Cas9 nucleases with no detectable genome-wide off-target effects. Nature 529, 490-495 (2016).
[0514] 6. Slaymaker, I. M. et al. Rationally engineered Cas9 nucleases with improved specificity. Science 351, 84-88 (2016).
[0515] 7. Fu, Y., Sander, J. D., Reyon, D., Cascio, V. M. & Joung, J. K. Improving CRISPR-Cas nuclease specificity using truncated guide RNAs. Nat. Biotechnol. 32, 279-284 (2014).
[0516] 8. Kleinstiver, B. P. et al. Engineered CRISPR-Cas9 nucleases with altered PAM specificities. Nature 523, 481-485 (2015).
[0517] 9. Kleinstiver, B. P. et al. Broadening the targeting range of Staphylococcus aureus CRISPR-Cas9 by modifying PAM recognition. Nat. Biotechnol. 33, 1293-1298 (2015).
[0518] 10. Hu, J. H. et al. Evolved Cas9 variants with broad PAM compatibility and high DNA specificity. Nature 1-24 (2018). doi:10.1038/nature26155
[0519] 11. Komor, A. C., Kim, Y. B., Packer, M. S., Zuris, J. A. & Liu, D. R. Programmable editing of a target base in genomic DNA without double-stranded DNA cleavage. Nature 533, 420-424 (2016).
[0520] 12. Gaudelli, N. M. et al. Programmable base editing of A⋅T to G⋅C in genomic DNA without DNA cleavage. Nature 1-27 (2017). doi:10.1038/nature24644
[0521] 13. Chu, V. T. et al. Increasing the efficiency of homology-directed repair for CRISPR-Cas9-induced precise gene editing in mammalian cells. Nat. Biotechnol. 33, 543-548 (2015).
[0522] 14. Richardson, C. D., Ray, G. J., DeWitt, M. A., Curie, G. L. & Corn, J. E. Enhancing homology-directed genome editing by catalytically active and inactive CRISPR-Cas9 using asymmetric donor DNA. Nat. Biotechnol. 34, 339-344 (2016).
[0523] 15. Paquet, D. et al. Efficient introduction of specific homozygous and heterozygous mutations using CRISPR/Cas9. Nature 533, 1-18 (2016).
[0524] 16. Landrum, M. J. et al. ClinVar: Public archive of interpretations of clinically relevant variants. Nucleic Acids Res. 44, D862-D868 (2016).
[0525] 17. Stenson, P. D. et al. Human Gene Mutation Database: towards a comprehensive central mutation database. J. Med. Genet. 45, 124 (2008).
[0526] 18. Shin, H. Y. et al. CRISPR/Cas9 targeting events cause complex deletions and insertions at 17 sites in the mouse genome. Nat. Commun. 8, 1-10 (2017).
[0527] 19. Sakuma, T., Nakade, S., Sakane, Y., Suzuki, K.-I. T. & Yamamoto, T. MMEJ-assisted gene knock-in using TALENs and CRISPR-Cas9 with the PITCh systems. Nat. Protoc. 11, 118-133 (2015).
[0528] 20. Suzuki, K. et al. In vivo genome editing via CRISPR/Cas9 mediated homology-independent targeted integration. Nature 540, 144-149 (2016).
[0529] 21. Nakade, S. et al. Microhomology-mediated end-joining-dependent integration of donor DNA in cells and animals using TALENs and CRISPR/Cas9. Nat. Commun. 5, 5560-5560 (2014).
[0530] 22. Kraft, K. et al. Deletions, Inversions, Duplications: Engineering of Structural Variants using CRISPR/Cas in Mice. Cell Rep. 10, 833-839.
[0531] 23. Koike-Yusa, H., Li, Y., Tan, E.-P., Velasco-Herrera, M. D. C. & Yusa, K. Genome-wide recessive genetic screening in mammalian cells with a lentiviral CRISPR-guide RNA library. Nat. Biotechnol. 32, 267-273 (2013).
[0532] 24. van Overbeek, M. et al. DNA Repair Profiling Reveals Nonrandom Outcomes at Cas9-Mediated Breaks. Mol. Cell 63, 633-646 (2016).
[0533] 25. Urasaki, A., Morvan, G. & Kawakami, K. Functional dissection of the Tol2 transposable element identified the minimal cis-sequence and a highly repetitive sequence in the subterminal region essential for transposition. Genetics 174, 639-649 (2006).
[0534] 26. Ceccaldi, R., Rondinelli, B. & D'Andrea, A. D. Repair Pathway Choices and Consequences at the Double-Strand Break. Spec. Issue Qual. Control 26, 52-64 (2016).
[0535] 27. Deriano, L. & Roth, D. B. Modernizing the Nonhomologous End-Joining Repertoire: Alternative and Classical NHEJ Share the Stage. Annu. Rev. Genet. 47, 433-455 (2013).
[0536] 28. Evers, B. et al. CRISPR knockout screening outperforms shRNA and CRISPRi in identifying essential genes. Nat. Biotechnol. 34, 631-633 (2016).
[0537] 29. Bae, S., Kweon, J., Kim, H. S. & Kim, J.-S. Microhomology-based choice of Cas9 nuclease target sites. Nat Methods 11, 705-706 (2014).
[0538] 30. Cornu, T. I., Mussolino, C. & Cathomen, T. Refining strategies to translate genome editing to the clinic. Nat. Med. 23, 415 (2017).
[0539] 31. Shalem, O., Sanjana, N. E. & Zhang, F. High-throughput functional genomics using CRISPR-Cas9. Nat. Rev. Genet. 16, 299 (2015).
[0540] 32. Mandal, P. K. et al. Efficient Ablation of Genes in Human Hematopoietic Stem and Effector Cells using CRISPR/Cas9. Cell Stem Cell 15, 643-652 (2014).
[0541] 33. Tabebordbar, M. et al. In vivo gene editing in dystrophic mouse muscle and muscle stem cells. Science 351, 407 (2016).
[0542] 34. Arbab, M., Srinivasan, S., Hashimoto, T., Geijsen, N. & Sherwood, R. I. Cloning-free CRISPR. Stem Cell Rep. 5, 908-917 (2015).
[0543] 35. Davis, A. J. & Chen, D. J. DNA double strand break repair via non-homologous end-joining. Transl. Cancer Res. 2, 130-143 (2013).
[0544] 36. Bourbon, M., Alves, A. C. & Sijbrands, E. J. Low-density lipoprotein receptor mutational analysis in diagnosis of familial hypercholesterolemia. Curr. Opin. Lipidol. 28, 120-129 (2017).
[0545] 37. Ran, F. A. et al. In vivo genome editing using Staphylococcus aureus Cas9. Nature 520, 186 (2015).
[0546] 38. Oh, J. et al. Positional cloning of a gene for Hermansky-Pudlak syndrome, a disorder of cytoplasmic organelles. Nat. Genet. 14, 300-306 (1996).
[0547] 39. Orthwein, A. et al. A mechanism for the suppression of homologous recombination in G1 cells. Nature 528, 422 (2015).
[0548] 40. Biehs, R. et al. DNA Double-Strand Break Resection Occurs during Non-homologous End Joining in G1 but Is Distinct from Resection during Homologous Recombination. Mol. Cell 671-684 (2017). doi:10.1016/j.molcel.2016.12.016
[0549] 41. Zetsche, B. et al. Cpf1 Is a Single RNA-Guided Endonuclease of a Class 2 CRISPR— Cas System. Cell 163, 759-771 (2015).
[0550] 42. Christian, M. et al. Targeting DNA Double-Strand Breaks with TAL Effector Nucleases. Genetics 186, 757 (2010).
[0551] 43. Kim, Y. G., Cha, J. & Chandrasegaran, S. Hybrid restriction enzymes: zinc finger fusions to Fok I cleavage domain. Proc. Natl. Acad. Sci. 93, 1156 (1996).
[0552] 44. Sherwood, R. I. et al. Discovery of directional and nondirectional pioneer transcription factors by modeling DNase profile magnitude and shape. Nat. Biotechnol. 32, 171-178 (2014).
[0553] 45. DiCarlo, J. E., Chavez, A., Dietz, S. L., Esvelt, K. M. & Church, G. M. Safeguarding CRISPR-Cas9 gene drives in yeast. Nat. Biotechnol. 33, 1250 (2015).
[0554] 46. McVey, M. & Lee, S. E. MMEJ repair of double-strand breaks (director's cut): deleted sequences and alternative endings. Trends Genet. 24, 529-538 (2008).
[0555] 47. Yu, A. M. & McVey, M. Synthesis-dependent microhomology-mediated end joining accounts for multiple types of repair junctions. Nucleic Acids Res. 38, 5706-5717 (2010).
[0556] 48. Heidenreich, E., Novotny, R., Kneidinger, B., Holzmann, V. & Wintersberger, U. Non; homologous end joining as an important mutagenic process in cell cycle; arrested cells. EMBO J. 22, 2274 (2003).
[0557] 49. Pfeiffer, P., Goedecke, W. & Obe, G. Mechanisms of DNA double-strand break repair and their potential to induce chromosomal aberrations. Mutagenesis 15, 289-302 (2000).

### Example 2: Workflow Description of Using inDelphi to Design Cas9 gRNAs for Efficient Genome Editing to Induce Exon Skipping

[0558] One application of CRISPR-Cas9 for therapeutic purposes is to alter the genome to cause RNA editing to skip a pathogenic exon by changing the splicing regulatory sites controlling the inclusion of the pathogenic exon. In some cases, a single exon in a gene may contain a pathogenic variant, and the entire exon can be skipped to produce an alternative isoform with normal function. For example, certain cases of Duchenne muscular dystrophy (DMD) are caused by a deleterious mutation in exon 23 of the Dmd gene that results in a premature stop codon that produces a dysfunctional Dmd protein. To restore function the deleterious exon 23 can skipped by editing the DNA proximal to the diseased exon with a single gRNA (Long, 2016).

[0559] This Example tests a new method for selecting gRNAs for CRISPR editing to disrupt splice site sequences to cause the skipping of pathogenic exons to restore wild-type cellular function. Splice site acceptor DNA motifs occur at the boundary between introns and exons, depicted as 5′-intron-AG-exon-3′, where the AG is a highly-conserved element of the splice site acceptor motif and is considered to reside in the intron. The splice site acceptor DNA motif is considered to be as long as 23 bp in length including the AG. Algorithms such as MaxEntScan (Yeo, 2004) receive as input a DNA sequence and output a numerical score representing how strongly the splice site acceptor motif is present at the DNA sequence.

[0560] CRISPR-Cas9 induces a DNA double-strand break at a specific location specified by the gRNA. DNA repair fixes the double-strand break, inducing insertions and deletions through non-homologous end-joining (NHEJ) and microhomology-mediated end-joining (MMEJ) when a homology template is not present for repair through homology-directed repair (HDR). InDelphi, as disclosed herein, predicts the frequency distribution of NHEJ/MMEJ-mediated repair genotypes following Cas9 cutting. In this Example, inDelphi's ability to predict the spectrum of repair genotypes is utilized to identify gRNAs that ablate the splice site acceptor motif at a high frequency out of all non-wild-type repair outcomes.

[0561] Other computational methods have focused on predicting on-target efficiency of CRISPR-Cas9 cutting. This Example aims to identify gRNAs that will efficiently cut and induce non-wild-type repair outcomes (otherwise described as high on-target activity). A relevant published method (Doench et al., 2016, Nature, aka “Azimuth”) uses the DNA sequence surrounding the gRNA, as well as the position of the cutsite in the protein, to predict the gRNA's ability to knock out the protein as observed in gRNA enrichment in screens of cell-essential genes, where a higher score indicates higher gRNA cutting efficacy. However, Doench et al. does not directly predict the frequency of non-wild-type repair frequency. It is reasoned here that the frequency of protein knockdown depends on the rate of non-wild-type repair, and the rate of frameshift repair out of all non-wild-type repair outcomes. Despite this concern, gRNAs are filtered based on a minimum threshold Azimuth score in order to maximize the chances that selected gRNAs have high on-target activity (increase true positives), at the risk of filtering away some gRNAs that also have high on-target activity (increase false negatives). In alternative embodiments, this Azimuth filtering step may be skipped to decrease the rate of false negatives at the risk of decreasing the rate of true positives.

[0562] To more directly address the question of on-target efficiency, this Example developed an algorithm referred to as the Basic On-Target Model (BOTM) which directly predicts the frequency of non-wild-type observations from DNA sequence features. BOTM uses DNA sequence as input and outputs a predicted frequency of non-wild-type repair, where non-wild-type repair is defined as the sum frequency of CRISPR-associated deletions and insertions (defined as reads aligning to the reference with exactly one gap which resides within 1-bp of the cutsite, using alignment scores +1 match, −1 mismatch, −5 gap open, −0 gap extend), over the denominator of sum frequency of non-noise outcomes consisting of CRISPR-associated indels, wildtype repair, and reads with multiple indels with at least one occurring near the cutsite, and reads with exactly one indel occurring anywhere outside the cutsite). BOTM is implemented as an ensemble of 100 gradient boosted regression trees, each with maximum depth 3, that are fitted in consecutive stages on the negative gradient of the least squares loss function. BOTM uses the following input features: one-hot encoded nucleotides at positions −7 to 0 (such that “NGG” occupies positions 0 to 2), the GC fraction of the 40-bp window around the cutsite, and the following features from inDelphi: log phi score (microhomology score), precision score (ranging from 0 to 1, with 1 being more precise), expected value of the indel length distribution, the frequency of 1-bp insertions, microhomology deletions, and microhomology-less deletions, the highest frequency of any single 1-bp insertion outcome, the highest frequency of any single deletion outcome, and the highest frequency of any single outcome. Trained on deep sequencing data at 3,600 target sites from our genome-integrated library construct in mES also used to train inDelphi, BOTM achieves a Pearson correlation of 0.42 at predicting the observed frequency of non-wild-type repair on 400 held-out target sites from our genome-integrated library construct in mES. On held-out data, it was manually determined a BOTM predicted frequency of 0.65 or greater for gRNAs that have a high frequency of non-wildtype repair.

[0563] One computational workflow for identifying Cas9 gRNAs with clinical relevance for the correction of genetic diseases by inducing exon skipping consists of four steps: identify relevant exons, select gRNAs for these exons with effective targeting, determine the genotypic products of each gRNA using inDelphi, and select gRNAs with genotypic products that are predicted to disrupt the relevant splicing motif. Using this approach, we have identified 4000 gRNAs that target splice sites to correct genetic diseases (Appendix attached).

[0564] First, 6805 exons with the following characteristics were determined: the exon length is evenly divisible by 3 so that skipping them preserves frame; the exon contains at least one HGMD pathogenic indel, which are likely to disrupt normal protein function (basal frameshift rate ˜66%, column “hgmd_indel_count” in Appendix spreadsheet); the exon is not constitutive, measured by <100% presence in Ensembl transcripts (Ensembl); and the exon does not contain an annotated protein domain in Pfam (Pfam). The last two criteria are used to identify exons that may not be essential for wild-type protein function. The resulting 6,805 exons were candidates for disease correction by exon skipping.

[0565] Then, SpCas9 gRNAs (NGG PAM) with cutsites in a 6 bp window surrounding and including the AG motif were selected, resulting in an average of 2.2 SpCas9 gRNAs per exon. We then ensured high predicted on-target editing efficiency by removing all gRNAs with Azimuth score below 0.20. (threshold set manually) or BOTM score below 0.65 which is chosen to separate gRNAs with high versus low frequencies of non-wild-type repair).

[0566] Each gRNA and exon target site for splice site motif disruption were scored. We obtained this prediction by first using inDelphi to predict the frequency distribution of 1-bp insertion and deletion (1-60 bp) genotypes resulting from template-free DNA repair of a CRISPR gRNA induced cut at the target exon site.

[0567] Finally, for each genotype predicted by inDelphi, we classified a genotype as “motif disrupting” when its MaxEntScan score is <0.9 of its unedited MaxEntScan score; otherwise we classified the genotype as “no effect”. This classification ruleset was provided by (Tang, 2016) and validated on experimental splicing data to achieve a sensitivity of 83.6% and specificity of 79.2% (Tang, 2016). The total frequency of all motif-disruption repair genotypes was used to predict the splice site motif disruption frequency out of all inDelphi predicted genotypes.

[0568] The top 4000 gRNA and target site pairs were selected based on this predicted frequency of splice site disruptions. Long, 2016 identified several SpCas9 gRNAs that, in a mouse model of muscular dystrophy, restored some degree of dystrophin protein expression and improved skeletal muscle function by inducing exon skipping of exon 23 (containing a non-sense mutation) via NHEJ-mediated DNA repair of a Cas9-induced cut. Without considering the results of their experiments and focusing solely on the DNA sequence context and background biological knowledge, our computational workflow recognizes that exon 23 of DMD is a good candidate for disease correction via exon skipping: the exon has a length evenly divisible by 3, is associated with a pathogenic non-sense variant that destroys normal protein function, and is not constitutive or required for normal protein function. Long 2016 reports results for only one SpCas9 gRNA targeting the 5′ end of exon 23 called sgRNA-L8 ATAATTTCTATTATATTACA with PAM GGG. In their experiments with sgRNA-L8, they observe 9/18 pups with exon 23 skipping. This gRNA targets mm10 chrX: 83,803,134-83,803,156 (minus strand), while the exon 23 boundary is 149-bp downstream at mm10 chrX: 83,803,305. This Example's computational workflow for now only identifies gRNAs cutting within a 6-bp window of the AG motif at the exon 5′ boundary, so as described our workflow does not identify Long's sgRNA-L8. Other methods of selecting exons for splice site acceptor removal include selecting exons with mutant splice regulatory sites that result in the inappropriate inclusion of exons in RNA transcripts (Sterne-Weiler 2014). Alternatively, subsequent expressed exons can be skipped to restore reading frame. In this case, reading frame can be restored by skipping a subsequent expressed exon where the length of the subsequent skipped exon and the length of the indel sum to 0 mod 3. In addition, constitutive exons and/or exons known to contain annotated protein domains in Pfam can be selected for exon skipping as an alternative method for knocking out a gene.

### Correcting Genetic Disorders Using Predictable CRISPR/Cas9-Induced Exon Skipping

[0569] Exon skipping has emerged as a powerful method to restore gene function in a number of genetic disorders. These therapies force the splicing machinery to bypass exons that contain deleterious point mutations or frameshifts. The FDA has recently approved an antisense oligonucleotide therapy that induces exon skipping in Duchenne muscular dystrophy to restore dystrophin function, and several other related strategies have shown pre-clinical promise. Yet, oligonucleotide therapies are transient treatments that require frequent dosing. CRISPR/Cas9 instead promises to alleviate genetic disease permanently, through genome alteration. Using a high-throughput experimental-computational pipeline, as described herein, the inventors have developed an algorithm capable of highly accurate prediction of CRISPR/Cas9 genotypic alterations. At a predictable subset of genomic target sites, CRISPR/Cas9 induces precise sequence deletions. These modifications are highly specific and have excellent potential for therapeutic genome editing through controlled deletion of splice-acceptor sites.

[0570] The inventors will systematically evaluate this new approach to treat genetic disorders using CRISPR/Cas9 deletions. At intron-exon junctions, we will induce small deletions to bypass exons containing deleterious variants that affect protein function or alter the reading frame. While not every splice site can be successfully deleted through CRISPR/Cas9 modification, and not every exon can be skipped without compromising gene function, the inventors expect that this approach will succeed in enough genes to have broad therapeutic implications. To measure the applicability of this approach to treat disease throughout the genome, the inventors will establish a principled computational approach to identify exons known to harbor disease-causing mutations where omission is unlikely to impact gene function. The inventors will then apply a novel, high-throughput CRISPR/Cas9 assay that quantifies the impact of high-precision genome editing on splicing at thousands of these intron-exon boundaries. After determining a set of candidate exons that can be skipped efficiently, the inventors will measure the impact of CRISPR/Cas9-mediated exon skipping on transcript structure and gene function for dozens of human disease exons. This exhaustive approach promises to chart a systematic path toward classifying disease genes that would be most amenable for future pre-clinical evaluation of permanent therapeutic exon skipping.

Induce Exon Skipping Using CRISPR/Cas9 at Thousands of Exons that Harbor Disease Variants.

[0571] By mapping coding variants known to be associated with genetic disorders, the inventors will develop a set of exons whose skipping could feasibly provide clinical benefit. The inventors will use measures of selective constraint from large-scale population data and alternative splicing data to prioritize exons whose skipping is least likely to compromise protein function. Using the herein described algorithm which predicts the genotypic consequence of targeting with CRISPR/Cas9, the inventors will refine a list of up to 10,000 intron-exon boundaries where modification is predicted to induce exon skipping at high rates. To test these predictions in high-throughput, the inventors will adapt our CRISPR/Cas9 cutting assay to read out context-specific splicing outcomes in human cells in vitro. This novel assay will allow paired evaluation of CRISPR/Cas9 cutting genotype and splicing phenotype for hundreds of distinct replicates in each of 10,000 human exons. The inventors will perform this assay in several human cell lines and will computationally identify exons that can be skipped at high frequency for further study. The inventors will also explore Cas9 base-editing in the same high-throughput system to determine if splicing can be altered by single base alterations. Using these data, the inventors will derive computational rules for which sequence alterations do and do not lead to exon skipping.

### Evaluate the Consequences of CRISPR/Cas9 Exon Skipping on Transcript Structure and Function.

[0572] Using results from the high-throughput assay, the inventors will select up to 100 exon-skipping guide RNAs to pursue in greater depth. The inventors will prioritize exons that are natively excluded from at least one experimentally validated splice isoform, that lack characterized protein domains, and that are under relaxed selective constraint. For these exons, the inventors will edit native genomes in an appropriate cell line given the gene function and disease process. By performing transcript-specific RNA deep sequencing, the inventors will determine the rate of exon skipping and the transcript structure after the exon is skipped, monitoring for the appearance of aberrant splice acceptors. The inventors will also assay the function of these genes with skipped exons, using appropriate cellular and biochemical assays for each gene. This analysis will identify a set of disease genes that are promising candidates for further study in mutated cell lines and animal models. Overall, this systematic study will elucidate which disease genes are compelling candidates for pre-clinical evaluation of CRISPR/Cas9-mediated exon skipping therapy.

### REFERENCES

[0573] Long C, Amoasii L, Mireault A, McAnally J, Li H, Sanchez-Ortiz E, Bhattacharyya S, Shelton J, Bassel-Duby R, Olson E. Postnatal genome editing partially restores dystrophin expression in a mouse model of muscular dystrophy. Science 2016; 351 (6271): 400-403.
[0574] Yeo G, Burge CB. Maximum entropy modeling of short sequence motifs with applications to RNA splicing signals. J Comput Biol. 2004; 11(2-3):377-94.
[0575] John G. Doench*, Nicolo Fusi*, Meagan Sullender*, Mudra Hegde*, Emma W. Vaimberg*, Katherine F. Donovan, Ian Smith, Zuzana Tothova, Craig Wilen, Robert Orchard, Herbert W. Virgin, Jennifer Listgarten*, David E. Root. Optimized sgRNA design to maximize activity and minimize off-target effects for genetic screens with CRISPR-Cas9. Nature Biotechnology January 2016.
[0576] Rongying Tang, Debra O. Prosser, and Donald R. Love, “Evaluation of Bioinformatic Programmes for the Analysis of Variants within Splice Site Consensus Regions,” Advances in Bioinformatics, vol. 2016, Article ID 5614058, 10 pages, 2016.
[0577] Sterne-Weiler T, Sanford J. Exon identity crisis: disease-causing mutations that disrupt the splicing code. Genome Biology 2014 15:201.

### OTHER EMBODIMENTS

[0578] The foregoing has been a description of certain non-limiting embodiments of the invention. Those of ordinary skill in the art will appreciate that various changes and modifications to this description may be made without departing from the spirit or scope of the present invention, as defined in the following claims.

### EQUIVALENTS AND SCOPE

[0579] In the claims articles such as “a,” “an,” and “the” may mean one or more than one unless indicated to the contrary or otherwise evident from the context. Claims or descriptions that include “or” between one or more members of a group are considered satisfied if one, more than one, or all of the group members are present in, employed in, or otherwise relevant to a given product or process unless indicated to the contrary or otherwise evident from the context. The invention includes embodiments in which exactly one member of the group is present in, employed in, or otherwise relevant to a given product or process. The invention includes embodiments in which more than one, or all of the group members are present in, employed in, or otherwise relevant to a given product or process.

[0580] Furthermore, the invention encompasses all variations, combinations, and permutations in which one or more limitations, elements, clauses, and descriptive terms from one or more of the listed claims is introduced into another claim. For example, any claim that is dependent on another claim can be modified to include one or more limitations found in any other claim that is dependent on the same base claim. Where elements are presented as lists, e.g., in Markush group format, each subgroup of the elements is also disclosed, and any element(s) can be removed from the group. It should it be understood that, in general, where the invention, or aspects of the invention, is/are referred to as comprising particular elements and/or features, certain embodiments of the invention or aspects of the invention consist, or consist essentially of, such elements and/or features. For purposes of simplicity, those embodiments have not been specifically set forth in haec verba herein. It is also noted that the terms “comprising” and “containing” are intended to be open and permits the inclusion of additional elements or steps. Where ranges are given, endpoints are included. Furthermore, unless otherwise indicated or otherwise evident from the context and understanding of one of ordinary skill in the art, values that are expressed as ranges can assume any specific value or sub-range within the stated ranges in different embodiments of the invention, to the tenth of the unit of the lower limit of the range, unless the context clearly dictates otherwise.

[0581] This application refers to various issued patents, published patent applications, journal articles, and other publications, all of which are incorporated herein by reference. If there is a conflict between any of the incorporated references and the instant specification, the specification shall control. In addition, any particular embodiment of the present invention that falls within the prior art may be explicitly excluded from any one or more of the claims. Because such embodiments are deemed to be known to one of ordinary skill in the art, they may be excluded even if the exclusion is not set forth explicitly herein. Any particular embodiment of the invention can be excluded from any claim, for any reason, whether or not related to the existence of prior art.

[0582] Those skilled in the art will recognize or be able to ascertain using no more than routine experimentation many equivalents to the specific embodiments described herein. The scope of the present embodiments described herein is not intended to be limited to the above Description, but rather is as set forth in the appended claims. Those of ordinary skill in the art will appreciate that various changes and modifications to this description may be made without departing from the spirit or scope of the present invention, as defined in the following claims.

Lengthy table referenced here
US20220238182A1-20220728-T00001
Please refer to the end of the specification for access instructions.

Lengthy table referenced here
US20220238182A1-20220728-T00002
Please refer to the end of the specification for access instructions.

Lengthy table referenced here
US20220238182A1-20220728-T00003
Please refer to the end of the specification for access instructions.

Lengthy table referenced here
US20220238182A1-20220728-T00004
Please refer to the end of the specification for access instructions.

Lengthy table referenced here
US20220238182A1-20220728-T00005
Please refer to the end of the specification for access instructions.

Lengthy table referenced here
US20220238182A1-20220728-T00006
Please refer to the end of the specification for access instructions.

Lengthy table referenced here
US20220238182A1-20220728-T00007
Please refer to the end of the specification for access instructions.

LENGTHY TABLES
The patent application contains a lengthy table section. A copy of the table is available in electronic form from the USPTO web site (https://seqdata.uspto.gov/?pageRequest=docDetail&DocID=US20220238182A1). An electronic copy of the table will also be available from the USPTO upon request and payment of the fee set forth in 37 CFR 1.19(b)(3).

The application's sequence listing, which the Patent Office published only in electronic form, follows.

SEQUENCE LISTING (11576 sequences)

SEQ ID NO: 1 - DNA, 14 bp, Artificial Sequence
  Synthetic polynucleotide
aggacaaatctgac

SEQ ID NO: 2 - DNA, 12 bp, Artificial Sequence
  Synthetic polynucleotide
ggacaaatctga

SEQ ID NO: 3 - DNA, 12 bp, Artificial Sequence
  Synthetic polynucleotide
caaatctgacga

SEQ ID NO: 4 - DNA, 13 bp, Artificial Sequence
  Synthetic polynucleotide
cctggcttttatc

SEQ ID NO: 5 - DNA, 13 bp, Artificial Sequence
  Synthetic polynucleotide
cagaaggtgactg

SEQ ID NO: 6 - DNA, 11 bp, Artificial Sequence
  Synthetic polynucleotide
ggtgcatatat

SEQ ID NO: 7 - DNA, 10 bp, Artificial Sequence
  Synthetic polynucleotide
acgtgcatga

SEQ ID NO: 8 - DNA, 60 bp, Artificial Sequence
  Synthetic polynucleotide
tttttgttttctgtgttccgttgtccgtgctgtaacgaaaggatgggtgcgacgcgtcat

SEQ ID NO: 9 - DNA, 60 bp, Artificial Sequence
  Synthetic polynucleotide
gttgataacggactagccttatttaaacttgctatgctgtttccagcatagctcttaaac

SEQ ID NO: 10 - DNA, 25 bp, Artificial Sequence
  Synthetic polynucleotide
gtttaagagctatgctggaaacagc

SEQ ID NO: 11 - DNA, 71 bp, Artificial Sequence
  Synthetic polynucleotide
atgacgcgtcgcacccatcctttcgttacagcacggacaacggaacacagaaaacaaaaaagcaccgactc

SEQ ID NO: 12 - DNA, 60 bp, Artificial Sequence
  Synthetic polynucleotide
gtaacttgaaagtatttcgatttcttggctttatatatcttgtggaaaggacgaaacacc

SEQ ID NO: 13 - DNA, 89 bp, Artificial Sequence
  Synthetic polynucleotide
ttgtggtttgtccaaactcatcaatgtatcttatcatgtctgctcgaagcggccgtacctctagattcagacgtgtgctcttccgatct

SEQ ID NO: 14 - DNA, 14 bp, Artificial Sequence
  Synthetic polynucleotide
aggacaaatctgac

SEQ ID NO: 15 - DNA, 12 bp, Artificial Sequence
  Synthetic polynucleotide
ggacaaatctga

SEQ ID NO: 16 - DNA, 12 bp, Artificial Sequence
  Synthetic polynucleotide
caaatctgacga

SEQ ID NO: 17 - DNA, 13 bp, Artificial Sequence
  Synthetic polynucleotide
cctggcttttatc

SEQ ID NO: 18 - DNA, 11 bp, Artificial Sequence
  Synthetic polynucleotide
ggtgcatatat

SEQ ID NO: 19 - DNA, 13 bp, Artificial Sequence
  Synthetic polynucleotide
cagaaggtgactg

SEQ ID NO: 20 - DNA, 22 bp, Artificial Sequence
  Synthetic polynucleotide
gctgcgaagatggctcggaggc

SEQ ID NO: 21 - DNA, 22 bp, Artificial Sequence
  Synthetic polynucleotide
gtgcaaggacaaatctgacagg

SEQ ID NO: 22 - DNA, 22 bp, Artificial Sequence
  Synthetic polynucleotide
gttcctcgtcagatttgtcctg

SEQ ID NO: 23 - DNA, 22 bp, Artificial Sequence
  Synthetic polynucleotide
gactgcaaggacaaatctgagg

SEQ ID NO: 24 - DNA, 22 bp, Artificial Sequence
  Synthetic polynucleotide
gttttcctcgtcagatttgtcg

SEQ ID NO: 25 - DNA, 21 bp, Artificial Sequence
  Synthetic polynucleotide
gacatctactcgctggtgagc

SEQ ID NO: 26 - DNA, 21 bp, Artificial Sequence
  Synthetic polynucleotide
gctgtccctggcttttatccc

SEQ ID NO: 27 - DNA, 21 bp, Artificial Sequence
  Synthetic polynucleotide
gtgtgaactatggtgcatata

SEQ ID NO: 28 - DNA, 22 bp, Artificial Sequence
  Synthetic polynucleotide
gcagctgcagaaggtgactgca

SEQ ID NO: 29 - DNA, 21 bp, Artificial Sequence
  Synthetic polynucleotide
gctgcagaaggtgactgcaga

SEQ ID NO: 30 - DNA, 51 bp, Artificial Sequence
  Synthetic polynucleotide
  misc_feature (29)..(31): n is a, c, g, or t
ctttccctacacgacgctcttccgatctnnnactccagctggcgctgtgat

SEQ ID NO: 31 - DNA, 51 bp, Artificial Sequence
  Synthetic polynucleotide
ggagttcagacgtgtgctcttccgatctcaacttcatcgctcatgtccttg

SEQ ID NO: 32 - DNA, 54 bp, Artificial Sequence
  Synthetic polynucleotide
  misc_feature (29)..(31): n is a, c, g, or t
ctttccctacacgacgctcttccgatctnnnaactcccgccaagatcaagaaag

SEQ ID NO: 33 - DNA, 51 bp, Artificial Sequence
  Synthetic polynucleotide
ggagttcagacgtgtgctcttccgatctcagcctcttttcatcctccaaga

SEQ ID NO: 34 - DNA, 54 bp, Artificial Sequence
  Synthetic polynucleotide
  misc_feature (29)..(31): n is a, c, g, or t
ctttccctacacgacgctcttccgatctnnncctcctacatggcttcagtttcc

SEQ ID NO: 35 - DNA, 51 bp, Artificial Sequence
  Synthetic polynucleotide
ggagttcagacgtgtgctcttccgatctccagagctccaaagagcaagttt

SEQ ID NO: 36 - DNA, 53 bp, Artificial Sequence
  Synthetic polynucleotide
  misc_feature (29)..(31): n is a, c, g, or t
ctttccctacacgacgctcttccgatctnnnagccactctggaccttctggta

SEQ ID NO: 37 - DNA, 51 bp, Artificial Sequence
  Synthetic polynucleotide
ggagttcagacgtgtgctcttccgatctccagtccgtgaggatattggaac

SEQ ID NO: 38 - DNA, 54 bp, Artificial Sequence
  Synthetic polynucleotide
  misc_feature (29)..(31): n is a, c, g, or t
ctttccctacacgacgctcttccgatctnnngatcgtgaatgagctggtacgtg

SEQ ID NO: 39 - DNA, 51 bp, Artificial Sequence
  Synthetic polynucleotide
ggagttcagacgtgtgctcttccgatctaacagcgagacacagatgtccag

SEQ ID NO: 40 - DNA, 92 bp, Artificial Sequence
  Synthetic polynucleotide
gatgggtgcgacgcgtcatagatcggaagagcacacgtctgaatattgtggaaaggacgaaacaccggtttaagagctatgctggaaacagc

SEQ ID NO: 41 - DNA, 7383 bp, Artificial Sequence
  Synthetic polynucleotide
ccacctaaattgtaagcgttaatattttgttaaaattcgcgttaaatttttgttaaatcagctcattttttaaccaataggccgaaatcggcaaaatcccttataaatcaaaagaatagaccgagatagggttgagtgttgttccagtttggaacaagagtccactattaaagaacgtggactccaacgtcaaagggcgaaaaaccgtctatcagggcgatggcccactacgtgaaccatcaccctaatcaagttttttggggtcgaggtgccgtaaagcactaaatcggaaccctaaagggagcccccgatttagagcttgacggggaaagccggcgaacgtggcgagaaaggaagggaagaaagcgaaaggagcgggcgctagggcgctggcaagtgtagcggtcacgctgcgcgtaaccaccacacccgccgcgcttaatgcgccgctacagggcgcgtcccattcgccattcaggctgcgcaactgttgggaagggcgatcggtgcgggcctcttcgctattacgccagctggcgaaagggggatgtgctgcaaggcgattaagttgggtaacgccagggttttcccagtcacgacgttgtaaaacgacggccagtgagcgcgcgtaatacgactcactatagggcgaattgggtaccggcatatggttcttgacagaggtgtaaaaagtactcaaaaattttactcaagtgaaagtacaagtacttagggaaaattttactcaattaaaagtaaaagtatctggctagaatcttacttgagtaaaagtaaaaaagtactccattaaaattgtacttgagtattaaggaagtaaaagtaaaagcaagaaagatcgatctcgaaggatctggaggccaccatggtgtcgataacttcgtatagcatacattatacgaagttatcgtgctcgacattgattattgactagttattaatagtaatcaattacggggtcattagttcatagcccatatatggagttccgcgttacataacttacggtaaatggcccgcctggctgaccgcccaacgacccccgcccattgacgtcaataatgacgtatgttcccatagtaacgccaatagggactttccattgacgtcaatgggtggagtatttacggtaaactgcccacttggcagtacatcaagtgtatcatatgccaagtacgccccctattgacgtcaatgacggtaaatggcccgcctggcattatgcccagtacatgaccttatgggactttcctacttggcagtacatctacgtattagtcatcgctattaccatggtcgaggtgagccccacgttctgcttcactctccccatctcccccccctccccacccccaattttgtatttatttattttttaattattttgtgcagcgatgggggcggggggggggggggggcgcgcgccaggcggggcggggcggggcgaggggcggggcggggcgaggcggagaggtgcggcggcagccaatcagagcggcgcgctccgaaagtttccttttatggcgaggcggcggcggcggcggccctataaaaagcgaagcgcgcggcgggcggggagtcgctgcgacgctgccttcgccccgtgccccgctccgccgccgcctcgcgccgcccgccccggctctgactgaccgcgttactcccacaggtgagcgggcgggacggcccttctcctccgggctgtaattagcgcttggtttaatgacggcttgtttcttttctgtggctgcgtgaaagccttgaggggctccgggagggccctttgtgcggggggagcggctcggggggtgcgtgcgtgtgtgtgtgcgtggggagcgccgcgtgcggctccgcgctgcccggcggctgtgagcgctgcgggcgcggcgcggggctttgtgcgctccgcagtgtgcgcgaggggagcgcggccgggggcggtgccccgcggtgcggggggggctgcgaggggaacaaaggctgcgtgcggggtgtgtgcgtgggggggtgagcagggggtgtgggcgcgtcggtcgggctgcaaccccccctgcacccccctccccgagttgctgagcacggcccggcttcgggtgcggggctccgtacggggcgtggcgcggggctcgccgtgccgggcggggggtggcggcaggtgggggtgccgggcggggcggggccgcctcgggccggggagggctcgggggaggggcgcggcggcccccggagcgccggcggctgtcgaggcgcggcgagccgcagccattgccttttatggtaatcgtgcgagagggcgcagggacttcctttgtcccaaatctgtgcggagccgaaatctgggaggcgccgccgcaccccctctagcgggcgcggggcgaagcggtgcggcgccggcaggaaggaaatgggcggggagggccttcgtgcgtcgccgcgccgccgtccccttctccctctccagcctcggggctgtccgcggggggacggctgccttcgggggggacggggcagggcggggttcggcttctggcgtgtgaccggcggctctagagcctctgctaaccatgttcatgccttcttctttttcctacagctcctgggcaacgtgctggttattgtgctgtctcatcattttggcaaagaattcctcgagcggccgccagtgtgatggatatcggatccgctagcgctactaacttcagcctgctgaagcaggctggagacgtggaggagaaccctggacctggaccggtcgccaccatggtgagcaagggcgaggagctgttcaccggggtggtgcccatcctggtcgagctggacggcgacgtaaacggccacaagttcagcgtgtccggcgagggcgagggcgatgccacctacggcaagctgaccctgaagttcatctgcaccaccggcaagctgcccgtgccctggcccaccctcgtgaccaccctgacctacggcgtgcagtgcttcagccgctaccccgaccacatgaagcagcacgacttcttcaagtccgccatgcccgaaggctacgtccaggagcgcaccatcttcttcaaggacgacggcaactacaagacccgcgccgaggtgaagttcgagggcgacaccctggtgaaccgcatcgagctgaagggcatcgacttcaaggaggacggcaacatcctggggcacaagctggagtacaactacaacagccacaacgtctatatcatggccgacaagcagaagaacggcatcaaggtgaacttcaagatccgccacaacatcgaggacggcagcgtgcagctcgccgaccactaccagcagaacacccccatcggcgacggccccgtgctgctgcccgacaaccactacctgagcacccagtccgccctgagcaaagaccccaacgagaagcgcgatcacatggtcctgctggagttcgtgaccgccgccgggatcactctcggcatggacgagctgtacaagtaaagcggccgccaccgcggtggagctcgaattaattcatcgatgatgatccagacatgataagatacattgatgagtttggacaaaccacaactagaatgcagtgaaaaaaatgctttatttgtgaaatttgtgatgctattgctttatttgtaaccattataagctgcaataaacaagttaacaacaacaattgcattcattttatgtttcaggttcagggggaggtgtgggaggttttttaaagcaagtaaaacctctacaaatgtggtatggctgattatgatcctctagagtcggtgggcctcgggggcgggtgcggggtcggcggggccgccccgggtggcttcggtcggagccatggggtcgtgcgctcctttcggtcgggcgctgcgggtcgtggggcgggcgtcaggcaccgggcttgcgggtcatgcaccaggtgcgcggtccttcgggcacctcgacgtcggcggtgacggtgaagccgagccgctcgtagaaggggaggttgcggggcgcggaggtctccaggaaggcgggcaccccggcgcgctcggccgcctccactccggggagcacgacggcgctgcccagacccttgccctggtggtcgggcgagacgccgacggtggccaggaaccacgcgggctccttgggccggtgcggcgccaggaggccttccatctgttgctgcgcggccagccgggaaccgctcaactcggccatgcgcgggccgatctcggcgaacaccgcccccgcttcgacgctctccggcgtggtccagaccgccaccgcggcgccgtcgtccgcgacccacaccttgccgatgtcgagcccgacgcgcgtgaggaagagttcttgcagctcggtgacccgctcgatgtggcggtccgggtcgacggtgtggcgcgtggcggggtagtcggcgaacgcggcggcgagggtgcgtacggcccgggggacgtcgtcgcgggtggcgaggcgcaccgtgggcttgtactcggtcatggaaggtcgtctccttgtgaggggtcaggggcgtgggtcaggggatggtggcggcaccggtcgtggcggccgacctgcaggcatgcaagctttttgcaaaagcctaggcctccaaaaaagcctcctcactacttctggaatagctcagaggccgaggcggcctcggcctctgcataaataaaaaaaattagtcagccatggggcggagaatgggcggaactgggcggagttaggggcgggatgggcggagttaggggcgggactatggttgctgactaattgagatgcatgctttgcatacttctgcctgctggggagcctggggactttccacacctggttgctgactaattgagatgcatgctttgcatacttctgcctgctggggagcctggggactttccacaccctaactgacacacattccacagaattcaagtgatctccaaaaaataagtactttttgactgtaaataaaattgtaaggagtaaaaagtacttttttttctaaaaaaatgtaattaagtaaaagtaaaagtattgatttttaattgtactcaagtaaagtaaaaatccccaaaaataatacttaagtacagtaatcaagtaaaattactcaagtactttacacctctggttcttgaccccctaccttcagcaagcccagcagatccgagctccagcttttgttccctttagtgagggttaattgcgcgcttggcgtaatcatggtcatagctgtttcctgtgtgaaattgttatccgctcacaattccacacaacatacgagccggaagcataaagtgtaaagcctggggtgcctaatgagtgagctaactcacattaattgcgttgcgctcactgcccgctttccagtcgggaaacctgtcgtgccagctgcattaatgaatcggccaacgcgcggggagaggcggtttgcgtattgggcgctcttccgcttcctcgctcactgactcgctgcgctcggtcgttcggctgcggcgagcggtatcagctcactcaaaggcggtaatacggttatccacagaatcaggggataacgcaggaaagaacatgtgagcaaaaggccagcaaaaggccaggaaccgtaaaaaggccgcgttgctggcgtttttccataggctccgcccccctgacgagcatcacaaaaatcgacgctcaagtcagaggtggcgaaacccgacaggactataaagataccaggcgtttccccctggaagctccctcgtgcgctctcctgttccgaccctgccgcttaccggatacctgtccgcctttctcccttcgggaagcgtggcgctttctcatagctcacgctgtaggtatctcagttcggtgtaggtcgttcgctccaagctgggctgtgtgcacgaaccccccgttcagcccgaccgctgcgccttatccggtaactatcgtcttgagtccaacccggtaagacacgacttatcgccactggcagcagccactggtaacaggattagcagagcgaggtatgtaggcggtgctacagagttcttgaagtggtggcctaactacggctacactagaaggacagtatttggtatctgcgctctgctgaagccagttaccttcggaaaaagagttggtagctcttgatccggcaaacaaaccaccgctggtagcggtggtttttttgtttgcaagcagcagattacgcgcagaaaaaaaggatctcaagaagatcctttgatcttttctacggggtctgacgctcagtggaacgaaaactcacgttaagggattttggtcatgagattatcaaaaaggatcttcacctagatccttttaaattaaaaatgaagttttaaatcaatctaaagtatatatgagtaaacttggtctgacagttaccaatgcttaatcagtgaggcacctatctcagcgatctgtctatttcgttcatccatagttgcctgactccccgtcgtgtagataactacgatacgggagggcttaccatctggccccagtgctgcaatgataccgcgagacccacgctcaccggctccagatttatcagcaataaaccagccagccggaagggccgagcgcagaagtggtcctgcaactttatccgcctccatccagtctattaattgttgccgggaagctagagtaagtagttcgccagttaatagtttgcgcaacgttgttgccattgctacaggcatcgtggtgtcacgctcgtcgtttggtatggcttcattcagctccggttcccaacgatcaaggcgagttacatgatcccccatgttgtgcaaaaaagcggttagctccttcggtcctccgatcgttgtcagaagtaagttggccgcagtgttatcactcatggttatggcagcactgcataattctcttactgtcatgccatccgtaagatgcttttctgtgactggtgagtactcaaccaagtcattctgagaatagtgtatgcggcgaccgagttgctcttgcccggcgtcaatacgggataataccgcgccacatagcagaactttaaaagtgctcatcattggaaaacgttcttcggggcgaaaactctcaaggatcttaccgctgttgagatccagttcgatgtaacccactcgtgcacccaactgatcttcagcatcttttactttcaccagcgtttctgggtgagcaaaaacaggaaggcaaaatgccgcaaaaaagggaataagggcgacacggaaatgttgaatactcatactcttcctttttcaatattattgaagcatttatcagggttattgtctcatgagcggatacatatttgaatgtatttagaaaaataaacaaataggggttccgcgcacatttccccgaaaagtg

SEQ ID NO: 42 - DNA, 2580 bp, Artificial Sequence
  Synthetic polynucleotide
atggggccctggggctggaaattgcgctggaccgtcgccttgctcctcgccgcggcggggactgcagtgggcgacagatgcgaaagaaacgagttccagtgccaagacgggaaatgcatctcctacaagtgggtctgcgatggcagcgctgagtgccaggatggctctgatgagtcccaggagacgtgcttgtctgtcacctgcaaatccggggacttcagctgtgggggccgtgtcaaccgctgcattcctcagttctggaggtgcgatggccaagtggactgcgacaacggctcagacgagcaaggctgtccccccaagacgtgctcccaggacgagtttcgctgccacgatgggaagtgcatctctcggcagttcgtctgtgactcagaccgggactgcttggacggctcagacgaggcctcctgcccggtgctcacctgtggtcccgccagcttccagtgcaacagctccacctgcatcccccagctgtgggcctgcgacaacgaccccgactgcgaagatggctcggatgagtggccgcagcgctgtaggggtctttacgtgttccaaggggacagtagcccctgctcggccttcgagttccactgcctaagtggcgagtgcatccactccagctggcgctgtgatggtggccccgactgcaaggacaaatctgacgaggaaaactgcgctgtggccacctgtcgccctgacgaattccagtgctctgatggaaactgcatccatggcagccggcagtgtgaccgggaatatgactgcaaggacatgagcgatgaagttggctgcgttaatgtgacactctgcgagggacccaacaagttcaagtgtcacagcggcgaatgcatcaccctggacaaagtctgcaacatggctagagactgccgggactggtcagatgaacccatcaaagagtgcgggaccaacgaatgcttggacaacaacggcggctgttcccacgtctgcaatgaccttaagatcggctacgagtgcctgtgccccgacggcttccagctggtggcccagcgaagatgcgaagatatcgatgagtgtcaggatcccgacacctgcagccagctctgcgtgaacctggagggtggctacaagtgccagtgtgaggaaggcttccagctggacccccacacgaaggcctgcaaggctgtgggctccatcgcctacctcttcttcaccaaccggcacgaggtcaggaagatgacgctggaccggagcgagtacaccagcctcatccccaacctgaggaacgtggtcgctctggacacggaggtggccagcaatagaatctactggtctgacctgtcccagagaatgatctgcagcacccagcttgacagagcccacggcgtctcttcctatgacaccgtcatcagcagagacatccaggcccccgacgggctggctgtggactggatccacagcaacatctactggaccgactctgtcctgggcactgtctctgttgcggataccaagggcgtgaagaggaaaacgttattcagggagaacggctccaagccaagggccatcgtggtggatcctgttcatggcttcatgtactggactgactggggaactcccgccaagatcaagaaagggggcctgaatggtgtggacatctactcgctggtgactgaaaacattcagtggcccaatggcatcaccctagatctcctcagtggccgcctctactgggttgactccaaacttcactccatctcaagcatcgatgtcaatgggggcaaccggaagaccatcttggaggatgaaaagaggctggcccaccccttctccttggccgtctttgaggacaaagtattttggacagatatcatcaacgaagccattttcagtgccaaccgcctcacaggttccgatgtcaacttgttggctgaaaacctactgtccccagaggatatggtcctcttccacaacctcacccagccaagaggagtgaactggtgtgagaggaccaccctgagcaatggcggctgccagtatctgtgcctccctgccccgcagatcaacccccactcgcccaagtttacctgcgcctgcccggacggcatgctgctggccagggacatgaggagctgcctcacagaggctgaggctgcagtggccacccaggagacatccaccgtcaggctaaaggtcagctccacagccgtaaggacacagcacacaaccacccggcctgttcccgacacctcccggctgcctggggccacccctgggctcaccacggtggagatagtgacaatgtctcaccaagctctgggcgacgttgctggcagaggaaatgagaagaagcccagtagcgtgagggctctgtccattgtcctccccatcgtgctcctcgtcttcctttgcctgggggtcttccttctatggaagaactggcggcttaagaacatcaacagcatcaactttgacaaccccgtctatcagaagaccacagaggatgaggtccacatttgccacaaccaggacggctacagctacccctcgagacagatggtcagtctggaggatgacgtggcg

SEQ ID NO: 43 - DNA, 389 bp, Artificial Sequence
  Synthetic polynucleotide
cccccaagacgtgctcccaggacgagtttcgctgccacgatgggaagtgcatctctcggcagttcgtctgtgactcagaccgggactgcttggacggctcagacgaggcctcctgcccggtgctcacctgtggtcccgccagcttccagtgcaacagctccacctgcatcccccagctgtgggcctgcgacaacgaccccgactgcgaagatggctcggaggctcggatgagtggccgcagcgctgtaggggtctttacgtgttccaaggggacagtagcccctgctcggccttcgagttccactgcctaagtggcgagtgcatccactccagctggcgctgtgatggtggccccgactgcaaggacaaatctgacgaggaaaactgcg

SEQ ID NO: 44 - DNA, 452 bp, Artificial Sequence
  Synthetic polynucleotide
cccccaagacgtgctcccaggacgagtttcgctgccacgatgggaagtgcatctctcggcagttcgtctgtgactcagaccgggactgcttggacggctcagacgaggcctcctgcccggtgctcacctgtggtcccgccagcttccagtgcaacagctccacctgcatcccccagctgtgggcctgcgacaacgaccccgactgcgaagatggctcggatgagtggccgcagcgctgtaggggtctttacgtgttccaaggggacagtagcccctgctcggccttcgagttccactgcctaagtggcgagtgcatccactccagctggcgctgtgatggtggccccgactgcaaggacaaatctgacaggacaaatctgacgaggaaaactgcgctgtggccacctgtcgccctgacgaattccagtgctctgatggaaactgcatccatg

SEQ ID NO: 45 - DNA, 450 bp, Artificial Sequence
  Synthetic polynucleotide
cccccaagacgtgctcccaggacgagtttcgctgccacgatgggaagtgcatctctcggcagttcgtctgtgactcagaccgggactgcttggacggctcagacgaggcctcctgcccggtgctcacctgtggtcccgccagcttccagtgcaacagctccacctgcatcccccagctgtgggcctgcgacaacgaccccgactgcgaagatggctcggatgagtggccgcagcgctgtaggggtctttacgtgttccaaggggacagtagcccctgctcggccttcgagttccactgcctaagtggcgagtgcatccactccagctggcgctgtgatggtggccccgactgcaaggacaaatctgaggacaaatctgacgaggaaaactgcgctgtggccacctgtcgccctgacgaattccagtgctctgatggaaactgcatccatg

SEQ ID NO: 46 - DNA, 450 bp, Artificial Sequence
  Synthetic polynucleotide
cccccaagacgtgctcccaggacgagtttcgctgccacgatgggaagtgcatctctcggcagttcgtctgtgactcagaccgggactgcttggacggctcagacgaggcctcctgcccggtgctcacctgtggtcccgccagcttccagtgcaacagctccacctgcatcccccagctgtgggcctgcgacaacgaccccgactgcgaagatggctcggatgagtggccgcagcgctgtaggggtctttacgtgttccaaggggacagtagcccctgctcggccttcgagttccactgcctaagtggcgagtgcatccactccagctggcgctgtgatggtggccccgactgcaaggacaaatctgacgacaaatctgacgaggaaaactgcgctgtggccacctgtcgccctgacgaattccagtgctctgatggaaactgcatccatg

SEQ ID NO: 47 - DNA, 127 bp, Artificial Sequence
  Synthetic polynucleotide
cttcatgtactggactgactggggaactcccgccaagatcaagaaagggggcctgaatggtgtggacatctactcgctggtgagctggtgactgaaaacattcagtggcccaatggcatcaccctag

SEQ ID NO: 48 - DNA, 2856 bp, Artificial Sequence
  Synthetic polynucleotide
atgggagtgaggcacccgccctgctcccaccggctcctggccgtctgcgccctcgtgtccttggcaaccgctgcactcctggggcacatcctactccatgatttcctgctggttccccgagagctgagtggctcctccccagtcctggaggagactcacccagctcaccagcagggagccagcagaccagggccccgggatgcccaggcacaccccggccgtcccagagcagtgcccacacagtgcgacgtcccccccaacagccgcttcgattgcgcccctgacaaggccatcacccaggaacagtgcgaggcccgcggctgttgctacatccctgcaaagcaggggctgcagggagcccagatggggcagccctggtgcttcttcccacccagctaccccagctacaagctggagaacctgagctcctctgaaatgggctacacggccaccctgacccgtaccacccccaccttcttccccaaggacatcctgaccctgcggctggacgtgatgatggagactgagaaccgcctccacttcacgatcaaagatccagctaacaggcgctacgaggtgcccttggagaccccgcatgtccacagccgggcaccgtccccactctacagcgtggagttctccgaggagcccttcggggtgatcgtgcgccggcagctggacggccgcgtgctgctgaacacgacggtggcgcccctgttctttgcggaccagttccttcagctgtccacctcgctgccctcgcagtatatcacaggcctcgccgagcacctcagtcccctgatgctcagcaccagctggaccaggatcaccctgtggaaccgggaccttgcgcccacgcccggtgcgaacctctacgggtctcaccctttctacctggcgctggaggacggcgggtcggcacacggggtgttcctgctaaacagcaatgccatggatgtggtcctgcagccgagccctgcccttagctggaggtcgacaggtgggatcctggatgtctacatcttcctgggcccagagcccaagagcgtggtgcagcagtacctggacgttgtgggatacccgttcatgccgccatactggggcctgggcttccacctgtgccgctggggctactcctccaccgctatcacccgccaggtggtggagaacatgaccagggcccacttccccctggacgtccagtggaacgacctggactacatggactcccggagggacttcacgttcaacaaggatggcttccgggacttcccggccatggtgcaggagctgcaccagggcggccggcgctacatgatgatcgtggatcctgccatcagcagctcgggccctgccgggagctacaggccctacgacgagggtctgcggaggggggttttcatcaccaacgagaccggccagccgctgattgggaaggtatggcccgggtccactgccttccccgacttcaccaaccccacagccctggcctggtgggaggacatggtggctgagttccatgaccaggtgcccttcgacggcatgtggattgacatgaacgagccttccaacttcatcaggggctctgaggacggctgccccaacaatgagctggagaacccaccctacgtgcctggggtggttggggggaccctccaggcggccaccatctgtgcctccagccaccagtttctctccacacactacaacctgcacaacctctacggcctgaccgaagccatcgcctcccacagggcgctggtgaaggctcgggggacacgcccatttgtgatctcccgctcgacctttgctggccacggccgatacgccggccactggacgggggacgtgtggagctcctgggagcagctcgcctcctccgtgccagaaatcctgcagtttaacctgctgggggtgcctctggtcggggccgacgtctgcggcttcctgggcaacacctcagaggagctgtgtgtgcgctggacccagctgggggccttctaccccttcatgcggaaccacaacagcctgctcagtctgccccaggagccgtacagcttcagcgagccggcccagcaggccatgaggaaggccctcaccctgcgctacgcactcctcccccacctctacacactgttccaccaggcccacgtcgcgggggagaccgtggcccggcccctcttcctggagttccccaaggactctagcacctggactgtggaccaccagctcctgtggggggaggccctgctcatcaccccagtgctccaggccgggaaggccgaagtgactggctacttccccttgggcacatggtacgacctgcagacggtgccagtagaggcccttggcagcctcccacccccacctgcagctccccgtgagccagccatccacagcgaggggcagtgggtgacgctgccggcccccctggacaccatcaacgtccacctccgggctgggtacatcatccccctgcagggccctggcctcacaaccacagagtcccgccagcagcccatggccctggctgtggccctgaccaagggtggggaggcccgaggggagctgttctgggacgatggagagagcctggaagtgctggagcgaggggcctacacacaggtcatcttcctggccaggaataacacgatcgtgaatgagctggtacgtgtgaccagtgagggagctggcctgcagctgcagaaggtgactgtcctgggcgtggccacggcgccccagcaggtcctctccaacggtgtccctgtctccaacttcacctacagccccgacaccaaggtcctggacatctgtgtctcgctgttgatgggagagcagtttctcgtcagctggtgt

SEQ ID NO: 49 - DNA, 2869 bp, Artificial Sequence
  Synthetic polynucleotide
atgggagtgaggcacccgccctgctcccaccggctcctggccgtctgcgccctcgtgtccttggcaaccgctgcactcctggggcacatcctactccatgatttcctgctggttccccgagagctgagtggctcctccccagtcctggaggagactcacccagctcaccagcagggagccagcagaccagggccccgggatgcccaggcacaccccggccgtcccagagcagtgcccacacagtgcgacgtcccccccaacagccgcttcgattgcgcccctgacaaggccatcacccaggaacagtgcgaggcccgcggctgttgctacatccctgcaaagcaggggctgcagggagcccagatggggcagccctggtgcttcttcccacccagctaccccagctacaagctggagaacctgagctcctctgaaatgggctacacggccaccctgacccgtaccacccccaccttcttccccaaggacatcctgaccctgcggctggacgtgatgatggagactgagaaccgcctccacttcacgatcaaagatccagctaacaggcgctacgaggtgcccttggagaccccgcatgtccacagccgggcaccgtccccactctacagcgtggagttctccgaggagcccttcggggtgatcgtgcgccggcagctggacggccgcgtgctgctgaacacgacggtggcgcccctgttctttgcggaccagttccttcagctgtccacctcgctgccctcgcagtatatcacaggcctcgccgagcacctcagtcccctgatgctcagcaccagctggaccaggatcaccctgtggaaccgggaccttgcgcccacgcccggtgcgaacctctacgggtctcaccctttctacctggcgctggaggacggcgggtcggcacacggggtgttcctgctaaacagcaatgccatggatgtggtcctgcagccgagccctgcccttagctggaggtcgacaggtgggatcctggatgtctacatcttcctgggcccagagcccaagagcgtggtgcagcagtacctggacgttgtgggatacccgttcatgccgccatactggggcctgggcttccacctgtgccgctggggctactcctccaccgctatcacccgccaggtggtggagaacatgaccagggcccacttccccctggacgtccagtggaacgacctggactacatggactcccggagggacttcacgttcaacaaggatggcttccgggacttcccggccatggtgcaggagctgcaccagggcggccggcgctacatgatgatcgtggatcctgccatcagcagctcgggccctgccgggagctacaggccctacgacgagggtctgcggaggggggttttcatcaccaacgagaccggccagccgctgattgggaaggtatggcccgggtccactgccttccccgacttcaccaaccccacagccctggcctggtgggaggacatggtggctgagttccatgaccaggtgcccttcgacggcatgtggattgacatgaacgagccttccaacttcatcaggggctctgaggacggctgccccaacaatgagctggagaacccaccctacgtgcctggggtggttggggggaccctccaggcggccaccatctgtgcctccagccaccagtttctctccacacactacaacctgcacaacctctacggcctgaccgaagccatcgcctcccacagggcgctggtgaaggctcgggggacacgcccatttgtgatctcccgctcgacctttgctggccacggccgatacgccggccactggacgggggacgtgtggagctcctgggagcagctcgcctcctccgtgccagaaatcctgcagtttaacctgctgggggtgcctctggtcggggccgacgtctgcggcttcctgggcaacacctcagaggagctgtgtgtgcgctggacccagctgggggccttctaccccttcatgcggaaccacaacagcctgctcagtctgccccaggagccgtacagcttcagcgagccggcccagcaggccatgaggaaggccctcaccctgcgctacgcactcctcccccacctctacacactgttccaccaggcccacgtcgcgggggagaccgtggcccggcccctcttcctggagttccccaaggactctagcacctggactgtggaccaccagctcctgtggggggaggccctgctcatcaccccagtgctccaggccgggaaggccgaagtgactggctacttccccttgggcacatggtacgacctgcagacggtgccagtagaggcccttggcagcctcccacccccacctgcagctccccgtgagccagccatccacagcgaggggcagtgggtgacgctgccggcccccctggacaccatcaacgtccacctccgggctgggtacatcatccccctgcagggccctggcctcacaaccacagagtcccgccagcagcccatggccctggctgtggccctgaccaagggtggggaggcccgaggggagctgttctgggacgatggagagagcctggaagtgctggagcgaggggcctacacacaggtcatcttcctggccaggaataacacgatcgtgaatgagctggtacgtgtgaccagtgagggagctggcctgcagctgcagaaggtgactgcagaaggtgactgtcctgggcgtggccacggcgccccagcaggtcctctccaacggtgtccctgtctccaacttcacctacagccccgacaccaaggtcctggacatctgtgtctcgctgttgatgggagagcagtttctcgtcagctggtgt

SEQ ID NO: 50 - DNA, 2031 bp, Artificial Sequence
  Synthetic polynucleotide
atgccggggttcctggttcgcatcctccctctgttgctggttctgctgcttctgggccctacgcgcggcttgcgcaatgccacccagaggatgtttgaaattgactatagccgggactccttcctcaaggatggccagccatttcgctacatctcaggaagcattcactactcccgtgtgccccgcttctactggaaggaccggctgctgaagatgaagatggctgggctgaacgccatccagacgtatgtgccctggaactttcatgagccctggccaggacagtaccagttttctgaggaccatgatgtggaatattttcttcggctggctcatgagctgggactgctggttatcctgaggcccgggccctacatctgtgcagagtgggaaatgggaggattacctgcttggctgctagagaaagagtctattcttctccgctcctccgacccagattacctggcagctgtggacaagtggttgggagtccttctgcccaagatgaagcctctcctctatcagaatggagggccagttataacagtgcaggttgaaaatgaatatggcagctactttgcctgtgattttgactacctgcgcttcctgcagaagcgctttcgccaccatctgggggatgatgtggttctgtttaccactgatggagcacataaaacattcctgaaatgtggggccctgcagggcctctacaccacggtggactttggaacaggcagcaacatcacagatgctttcctaagccagaggaagtgtgagcccaaaggacccttgatcaattctgaattctatactggctggctagatcactggggccaacctcactccacaatcaagaccgaagcagtggcttcctccctctatgatatacttgcccgtggggcgagtgtgaacttgtacatgtttataggtgggaccaattttgcctattggaatggggccaactcaccctatgcagcacagcccaccagctacgactatgatgccccactgagtgaggctggggacctcactgagaagtattttgctctgcgaaacatcatccagaagtttgaaaaagtaccagaaggtcctatccctccatctacaccaaagtttgcatatggaaaggtcactttggaaaagttaaagacagtgggagcagctctggacattctgtgtccctctgggcccatcaaaagcctttatcccttgacatttatccaggtgaaacagcattatgggtttgtgctgtaccggacaacacttcctcaagattgcagcaacccagcacctctctcttcacccctcaatggagtccacgatcgagcatatgttgctgtggatgggatcccccagggagtccttgagcgaaacaatgtgatcactctgaacataacagggaaagctggagccactctggaccttctggtagagaacatgggacgtgtgaactatggtgcatatatcaacgattttaagggtttggtttctaacctgactctcagttccaatatcctcacggactggacgatctttccactggacactgaggatgcagtgtgcagccacctggggggctggggacaccgtgacagtggccaccatgatgaagcctgggcccacaactcatccaactacacgctcccggccttttatatggggaacttctccattcccagtgggatcccagacttgccccaggacacctttatccagtttcctggatggaccaagggccaggtctggattaatggctttaaccttggccgctattggccagcccggggccctcagttgaccttgtttgtgccccagcacatcctgatgacctcggccccaaacaccatcaccgtgctggaactggagtgggcaccctgcagcagtgatgatccagaactatgtgctgtgacgttcgtggacaggccagttattggctcatctgtgacctacgatcatccctccaaacctgttgaaaaaagactcatgcccccacccccgcaaaaaaacaaagattcatggctggaccatgta

SEQ ID NO: 51 - DNA, 2042 bp, Artificial Sequence
  Synthetic polynucleotide
atgccggggttcctggttcgcatcctccctctgttgctggttctgctgcttctgggccctacgcgcggcttgcgcaatgccacccagaggatgtttgaaattgactatagccgggactccttcctcaaggatggccagccatttcgctacatctcaggaagcattcactactcccgtgtgccccgcttctactggaaggaccggctgctgaagatgaagatggctgggctgaacgccatccagacgtatgtgccctggaactttcatgagccctggccaggacagtaccagttttctgaggaccatgatgtggaatattttcttcggctggctcatgagctgggactgctggttatcctgaggcccgggccctacatctgtgcagagtgggaaatgggaggattacctgcttggctgctagagaaagagtctattcttctccgctcctccgacccagattacctggcagctgtggacaagtggttgggagtccttctgcccaagatgaagcctctcctctatcagaatggagggccagttataacagtgcaggttgaaaatgaatatggcagctactttgcctgtgattttgactacctgcgcttcctgcagaagcgctttcgccaccatctgggggatgatgtggttctgtttaccactgatggagcacataaaacattcctgaaatgtggggccctgcagggcctctacaccacggtggactttggaacaggcagcaacatcacagatgctttcctaagccagaggaagtgtgagcccaaaggacccttgatcaattctgaattctatactggctggctagatcactggggccaacctcactccacaatcaagaccgaagcagtggcttcctccctctatgatatacttgcccgtggggcgagtgtgaacttgtacatgtttataggtgggaccaattttgcctattggaatggggccaactcaccctatgcagcacagcccaccagctacgactatgatgccccactgagtgaggctggggacctcactgagaagtattttgctctgcgaaacatcatccagaagtttgaaaaagtaccagaaggtcctatccctccatctacaccaaagtttgcatatggaaaggtcactttggaaaagttaaagacagtgggagcagctctggacattctgtgtccctctgggcccatcaaaagcctttatcccttgacatttatccaggtgaaacagcattatgggtttgtgctgtaccggacaacacttcctcaagattgcagcaacccagcacctctctcttcacccctcaatggagtccacgatcgagcatatgttgctgtggatgggatcccccagggagtccttgagcgaaacaatgtgatcactctgaacataacagggaaagctggagccactctggaccttctggtagagaacatgggacgtgtgaactatggtgcatatatggtgcatatatcaacgattttaagggtttggtttctaacctgactctcagttccaatatcctcacggactggacgatctttccactggacactgaggatgcagtgtgcagccacctggggggctggggacaccgtgacagtggccaccatgatgaagcctgggcccacaactcatccaactacacgctcccggccttttatatggggaacttctccattcccagtgggatcccagacttgccccaggacacctttatccagtttcctggatggaccaagggccaggtctggattaatggctttaaccttggccgctattggccagcccggggccctcagttgaccttgtttgtgccccagcacatcctgatgacctcggccccaaacaccatcaccgtgctggaactggagtgggcaccctgcagcagtgatgatccagaactatgtgctgtgacgttcgtggacaggccagttattggctcatctgtgacctacgatcatccctccaaacctgttgaaaaaagactcatgcccccacccccgcaaaaaaacaaagattcatggctggaccatgta

SEQ ID NO: 52 - DNA, 1365 bp, Artificial Sequence
  Synthetic polynucleotide
atggccacctttagccgccaggaatttttccagcagctactgcaaggctgtctcctgcctactgcccagcagggccttgaccagatctggctgctccttgccatctgcctcgcctgccgcctcctctggaggctcgggttgccatcctacctgaagcatgcaagcaccgtggcaggcgggttcttcagcctctaccacttcttccagctgcacatggtttgggtcgtgctgctcagcctcctgtgctacctcgtgctgttcctctgccgacattcctcccatcgaggcgtcttcctatccgtcaccatcctcatctacctactcatgggtgagatgcacatggtagacaccgtgacatggcacaagatgcgaggggcacagatgattgtggccatgaaggcagtgtctctgggcttcgacctggaccggggcgaggtgggtacggtgccctcgccagtggagttcatgggctacctctacttcgtgggcaccatcgtcttcgggccctggatatccttccacagctacctacaagctgtccaaggccgcccactgagctgccggtggctgcagaaggtggcccggagcctggcactggccctgctgtgccttgtgctgtccacttgcgtgggcccctacctcttcccgtacttcatccccctcaacggtgaccgcctccttcgcaagggcaccatggtaaggtggctgcgagcctacgagagtgctgtctccttccacttcagcaactattttgtgggctttctttccgaggccacggccacgttggcgggggctggctttaccgaggagaaggatcacctggaatgggacctgacggtgtccaagccactgaatgtggagctgcctcggtcaatggtggaagttgtcacaagctggaacctgcccatgtcttattggctaaataactatgttttcaagaatgctctccgcctggggaccttctcggctgtgctggtcacctatgcagccagcgccctcctacatggcttcagtttccacctggctgcggtcctgctgtccctggcttttatcacttacgtggagcatgtcctccggaagcgcctggctcggatcctcagtgcctgtgtcttgtcaaagcggtgcccgccagactgttcgcaccagcatcgcttgggcctgggggtgcgagccttaaacttgctctttggagctctggccatcttccacctggcctacctgggctccctgtttgatgtcgatgtggatgacaccacagaggagcagggctacggcatggcatacactgtccacaagtggtcagagctcagctgggccagtcactgggtcacttttggatgctggatcttctaccgtctcataggc

SEQ ID NO: 53 - DNA, 1378 bp, Artificial Sequence
  Synthetic polynucleotide
atggccacctttagccgccaggaatttttccagcagctactgcaaggctgtctcctgcctactgcccagcagggccttgaccagatctggctgctccttgccatctgcctcgcctgccgcctcctctggaggctcgggttgccatcctacctgaagcatgcaagcaccgtggcaggcgggttcttcagcctctaccacttcttccagctgcacatggtttgggtcgtgctgctcagcctcctgtgctacctcgtgctgttcctctgccgacattcctcccatcgaggcgtcttcctatccgtcaccatcctcatctacctactcatgggtgagatgcacatggtagacaccgtgacatggcacaagatgcgaggggcacagatgattgtggccatgaaggcagtgtctctgggcttcgacctggaccggggcgaggtgggtacggtgccctcgccagtggagttcatgggctacctctacttcgtgggcaccatcgtcttcgggccctggatatccttccacagctacctacaagctgtccaaggccgcccactgagctgccggtggctgcagaaggtggcccggagcctggcactggccctgctgtgccttgtgctgtccacttgcgtgggcccctacctcttcccgtacttcatccccctcaacggtgaccgcctccttcgcaagggcaccatggtaaggtggctgcgagcctacgagagtgctgtctccttccacttcagcaactattttgtgggctttctttccgaggccacggccacgttggcgggggctggctttaccgaggagaaggatcacctggaatgggacctgacggtgtccaagccactgaatgtggagctgcctcggtcaatggtggaagttgtcacaagctggaacctgcccatgtcttattggctaaataactatgttttcaagaatgctctccgcctggggaccttctcggctgtgctggtcacctatgcagccagcgccctcctacatggcttcagtttccacctggctgcggtcctgctgtccctggcttttatccctggcttttatcacttacgtggagcatgtcctccggaagcgcctggctcggatcctcagtgcctgtgtcttgtcaaagcggtgcccgccagactgttcgcaccagcatcgcttgggcctgggggtgcgagccttaaacttgctctttggagctctggccatcttccacctggcctacctgggctccctgtttgatgtcgatgtggatgacaccacagaggagcagggctacggcatggcatacactgtccacaagtggtcagagctcagctgggccagtcactgggtcacttttggatgctggatcttctaccgtctcataggc

SEQ ID NO: 54 - DNA, 78 bp, Artificial Sequence
  Synthetic polynucleotide
aatgggaaaaagttaacaaaatgtacaaggaccgacaagggtaggtaacacatatatttttcttgatacttgcagaaa

SEQ ID NO: 55 - DNA, 78 bp, Artificial Sequence
  Synthetic polynucleotide
tttctgcaagtatcaagaaaaatatatgtgttacctacccttgtcggtccttgtacattttgttaactttttcccatt

SEQ ID NO: 56 - DNA, 39 bp, Artificial Sequence
  Synthetic polynucleotide
aatgggaaaaagttaacaaaatgtacaaggaccgacaag

SEQ ID NO: 57 - DNA, 34 bp, Artificial Sequence
  Synthetic polynucleotide
gtaacacatatatttttcttgatacttgcagaaa

SEQ ID NO: 58 - DNA, 39 bp, Artificial Sequence
  Synthetic polynucleotide
tttctgcaagtatcaagaaaaatatatgtgttacctacc

SEQ ID NO: 59 - DNA, 34 bp, Artificial Sequence
  Synthetic polynucleotide
cggtccttgtacattttgttaactttttcccatt

SEQ ID NO: 60 - DNA, 14 bp, Artificial Sequence
  Synthetic polynucleotide
acgtaccgtacggt

SEQ ID NO: 61 - DNA, 14 bp, Artificial Sequence
  Synthetic polynucleotide
accgtacggtacgt

SEQ ID NO: 62 - DNA, 14 bp, Artificial Sequence
  Synthetic polynucleotide
acgtaccgtacggt

SEQ ID NO: 63 - DNA, 13 bp, Artificial Sequence
  Synthetic polynucleotide
tggcatgcatgca

SEQ ID NO: 64 - DNA, 49 bp, Artificial Sequence
  Synthetic polynucleotide
ctggttctaatttctcatttgcaggaaatgctggcatagagcagcacta

SEQ ID NO: 65 - DNA, 10 bp, Artificial Sequence
  Synthetic polynucleotide
ggcttagatt

SEQ ID NO: 66 - DNA, 10 bp, Artificial Sequence
  Synthetic polynucleotide
attcgggtgt

SEQ ID NO: 67 - DNA, 11 bp, Artificial Sequence
  Synthetic polynucleotide
gggcttagatt

SEQ ID NO: 68 - DNA, 11 bp, Artificial Sequence
  Synthetic polynucleotide
gattcgggtgt

SEQ ID NO: 69 - DNA, 12 bp, Artificial Sequence
  Synthetic polynucleotide
tgggcttagatt

SEQ ID NO: 70 - DNA, 12 bp, Artificial Sequence
  Synthetic polynucleotide
agattcgggtgt

SEQ ID NO: 71 - DNA, 13 bp, Artificial Sequence
  Synthetic polynucleotide
gtgggcttagatt

SEQ ID NO: 72 - DNA, 13 bp, Artificial Sequence
  Synthetic polynucleotide
tagattcgggtgt

SEQ ID NO: 73 - DNA, 14 bp, Artificial Sequence
  Synthetic polynucleotide
ggtgggcttagatt

SEQ ID NO: 74 - DNA, 14 bp, Artificial Sequence
  Synthetic polynucleotide
ttagattcgggtgt

SEQ ID NO: 75 - DNA, 15 bp, Artificial Sequence
  Synthetic polynucleotide
aggtgggcttagatt

SEQ ID NO: 76 - DNA, 15 bp, Artificial Sequence
  Synthetic polynucleotide
tttagattcgggtgt

SEQ ID NO: 77 - DNA, 16 bp, Artificial Sequence
  Synthetic polynucleotide
taggtgggcttagatt

SEQ ID NO: 78 - DNA, 16 bp, Artificial Sequence
  Synthetic polynucleotide
ctttagattcgggtgt

SEQ ID NO: 79 - DNA, 17 bp, Artificial Sequence
  Synthetic polynucleotide
ttaggtgggcttagatt

SEQ ID NO: 80 - DNA, 17 bp, Artificial Sequence
  Synthetic polynucleotide
tctttagattcgggtgt

SEQ ID NO: 81 - DNA, 18 bp, Artificial Sequence
  Synthetic polynucleotide
attaggtgggcttagatt

SEQ ID NO: 82 - DNA, 18 bp, Artificial Sequence
  Synthetic polynucleotide
atctttagattcgggtgt

SEQ ID NO: 83 - DNA, 19 bp, Artificial Sequence
  Synthetic polynucleotide
aattaggtgggcttagatt

SEQ ID NO: 84 - DNA, 19 bp, Artificial Sequence
  Synthetic polynucleotide
catctttagattcgggtgt

SEQ ID NO: 85 - DNA, 20 bp, Artificial Sequence
  Synthetic polynucleotide
caattaggtgggcttagatt

SEQ ID NO: 86 - DNA, 20 bp, Artificial Sequence
  Synthetic polynucleotide
tcatctttagattcgggtgt

SEQ ID NO: 87 - DNA, 21 bp, Artificial Sequence
  Synthetic polynucleotide
acaattaggtgggcttagatt

SEQ ID NO: 88 - DNA, 21 bp, Artificial Sequence
  Synthetic polynucleotide
gtcatctttagattcgggtgt

SEQ ID NO: 89 - DNA, 22 bp, Artificial Sequence
  Synthetic polynucleotide
tacaattaggtgggcttagatt

SEQ ID NO: 90 - DNA, 22 bp, Artificial Sequence
  Synthetic polynucleotide
agtcatctttagattcgggtgt

SEQ ID NO: 91 - DNA, 23 bp, Artificial Sequence
  Synthetic polynucleotide
gtacaattaggtgggcttagatt

SEQ ID NO: 92 - DNA, 23 bp, Artificial Sequence
  Synthetic polynucleotide
cagtcatctttagattcgggtgt

SEQ ID NO: 93 - DNA, 24 bp, Artificial Sequence
  Synthetic polynucleotide
agtacaattaggtgggcttagatt

SEQ ID NO: 94 - DNA, 24 bp, Artificial Sequence
  Synthetic polynucleotide
tcagtcatctttagattcgggtgt

SEQ ID NO: 95 - DNA, 25 bp, Artificial Sequence
  Synthetic polynucleotide
cagtacaattaggtgggcttagatt

SEQ ID NO: 96 - DNA, 25 bp, Artificial Sequence
  Synthetic polynucleotide
atcagtcatctttagattcgggtgt

SEQ ID NO: 97 - DNA, 26 bp, Artificial Sequence
  Synthetic polynucleotide
tcagtacaattaggtgggcttagatt

SEQ ID NO: 98 - DNA, 26 bp, Artificial Sequence
  Synthetic polynucleotide
catcagtcatctttagattcgggtgt

SEQ ID NO: 99 - DNA, 20 bp, Artificial Sequence
  Synthetic polynucleotide
  misc_feature (1)..(1): n is a, c, g, or t
  misc_feature (20)..(20): n is a, c, g, or t
ntatcgggactatcgggacn

SEQ ID NO: 100 - DNA, 10 bp, Artificial Sequence
  Synthetic polynucleotide
  misc_feature (1)..(1): n is a, c, g, or t
ntatcgggac

SEQ ID NO: 101 - DNA, 10 bp, Artificial Sequence
  Synthetic polynucleotide
  misc_feature (10)..(10): n is a, c, g, or t
tatcgggacn

SEQ ID NO: 102 - DNA, 11 bp, Artificial Sequence
  Synthetic polynucleotide
  misc_feature (1)..(1): n is a, c, g, or t
  misc_feature (11)..(11): n is a, c, g, or t
ntatcgggacn

SEQ ID NO: 103 - DNA, 55 bp, Artificial Sequence
  Synthetic polynucleotide
  misc_feature (26)..(29): n is a, c, g, or t
gcccccacaaagcggaccagccagcnnnntagggaataaggccaacttgcacccc

SEQ ID NO: 104 - DNA, 55 bp, Artificial Sequence
  Synthetic polynucleotide
  misc_feature (26)..(29): n is a, c, g, or t
agtgcacgagtgacgggataatgtgnnnncaggtaattgataggcttccaactta

SEQ ID NO: 105 - DNA, 55 bp, Artificial Sequence
  Synthetic polynucleotide
  misc_feature (26)..(29): n is a, c, g, or t
ccgagacctacgcgaaccgaaatcgnnnnccggtgcgcaagcagggctggcgtcc

SEQ ID NO: 106 - DNA, 20 bp, Artificial Sequence
  Synthetic polynucleotide
ctcgctggtgagctggtgac

SEQ ID NO: 107 - DNA, 10 bp, Artificial Sequence
  Synthetic polynucleotide
ctcgctggtg

SEQ ID NO: 108 - DNA, 10 bp, Artificial Sequence
  Synthetic polynucleotide
agctggtgac

SEQ ID NO: 109 - DNA, 12 bp, Artificial Sequence
  Synthetic polynucleotide
ctcgctggtgac

SEQ ID NO: 110 - DNA, 11 bp, Artificial Sequence
  Synthetic polynucleotide
  misc_feature (1)..(2): n is a, c, g, or t
  misc_feature (10)..(11): n is a, c, g, or t
nngactggtnn

SEQ ID NO: 111 - DNA, 11 bp, Artificial Sequence
  Synthetic polynucleotide
  misc_feature (1)..(2): n is a, c, g, or t
  misc_feature (10)..(11): n is a, c, g, or t
nnaactggtnn

SEQ ID NO: 112 - DNA, 11 bp, Artificial Sequence
  Synthetic polynucleotide
  misc_feature (1)..(2): n is a, c, g, or t
  misc_feature (10)..(11): n is a, c, g, or t
nnacctggtnn

SEQ ID NO: 113 - DNA, 11 bp, Artificial Sequence
  Synthetic polynucleotide
  misc_feature (1)..(2): n is a, c, g, or t
  misc_feature (10)..(11): n is a, c, g, or t
nnaccgggtnn

SEQ ID NO: 114 - DNA, 11 bp, Artificial Sequence
  Synthetic polynucleotide
  misc_feature (1)..(2): n is a, c, g, or t
  misc_feature (10)..(11): n is a, c, g, or t
nnaccgagtnn

SEQ ID NO: 115 - DNA, 18 bp, Artificial Sequence
  Synthetic polynucleotide
  misc_feature (1)..(2): n is a, c, g, or t
  misc_feature (17)..(18): n is a, c, g, or t
nnaccgagtgactggtnn

SEQ ID NO: 116 - DNA, 14 bp, Artificial Sequence
  Synthetic polynucleotide
aggacaaatctgac

SEQ ID NO: 117 - DNA, 20 bp, Artificial Sequence
  Synthetic polynucleotide
ctttcactttatagatttat

SEQ ID NO: 118 - DNA, 20 bp, Artificial Sequence
  Synthetic polynucleotide
aatcctctaaatagttaaat

SEQ ID NO: 119 - DNA, 20 bp, Artificial Sequence
  Synthetic polynucleotide
aaatatctttaacctaaaac

SEQ ID NO: 120 - DNA, 20 bp, Artificial Sequence
  Synthetic polynucleotide
tgtcatctttatgcttaaag

SEQ ID NO: 121 - DNA, 20 bp, Artificial Sequence
  Synthetic polynucleotide
tttaagcacagcaaggctct

SEQ ID NO: 122 - DNA, 20 bp, Artificial Sequence
  Synthetic polynucleotide
tcttatcttgcaaggcttca

SEQ ID NO: 123 - DNA, 20 bp, Artificial Sequence
  Synthetic polynucleotide
tccgctctacaatatgtatg

SEQ ID NO: 124 - DNA, 20 bp, Artificial Sequence
  Synthetic polynucleotide
acctcccatactggtacttc

SEQ ID NO: 125 - DNA, 20 bp, Artificial Sequence
  Synthetic polynucleotide
aacaatcctgcatacgaata

SEQ ID NO: 126 - DNA, 20 bp, Artificial Sequence
  Synthetic polynucleotide
accatccgttaatgtagcgt

SEQ ID NO: 127 - DNA, 20 bp, Artificial Sequence
  Synthetic polynucleotide
ttaatacatgtaagtctgtc

SEQ ID NO: 128 - DNA, 20 bp, Artificial Sequence
  Synthetic polynucleotide
aaaagactacggttctgatc

SEQ ID NO: 129 - DNA, 20 bp, Artificial Sequence
  Synthetic polynucleotide
tgtgctcgaagctagcaagc

SEQ ID NO: 130 - DNA, 20 bp, Artificial Sequence
  Synthetic polynucleotide
aactttcaatccttcaccac

SEQ ID NO: 131 - DNA, 20 bp, Artificial Sequence
  Synthetic polynucleotide
acatcaccaaatagatgcga

SEQ ID NO: 132 - DNA, 20 bp, Artificial Sequence
  Synthetic polynucleotide
acatatcaccttggtaaaat

SEQ ID NO: 133 - DNA, 20 bp, Artificial Sequence
  Synthetic polynucleotide
tactctcaacatggtaaaat

SEQ ID NO: 134 - DNA, 20 bp, Artificial Sequence
  Synthetic polynucleotide
tctggcctccttcaggattt

SEQ ID NO: 135 - DNA, 20 bp, Artificial Sequence
  Synthetic polynucleotide
atagaactttattccttcct

SEQ ID NO: 136 - DNA, 20 bp, Artificial Sequence
  Synthetic polynucleotide
acattacttatattacttac

SEQ ID NO: 137 - DNA, 20 bp, Artificial Sequence
  Synthetic polynucleotide
tactgtccatagccttatag

SEQ ID NO: 138 - DNA, 20 bp, Artificial Sequence
  Synthetic polynucleotide
aggatgcacgaacttggatt

SEQ ID NO: 139 - DNA, 20 bp, Artificial Sequence
  Synthetic polynucleotide
aaaatactcaacgtagatgt

SEQ ID NO: 140 - DNA, 20 bp, Artificial Sequence
  Synthetic polynucleotide
gtacttctatcctaaattcc

SEQ ID NO: 141 - DNA, 20 bp, Artificial Sequence
  Synthetic polynucleotide
ttcccacttaggaacgcatt

SEQ ID NO: 142 - DNA, 20 bp, Artificial Sequence
  Synthetic polynucleotide
tgatttcattatttgacaga

SEQ ID NO: 143 - DNA, 20 bp, Artificial Sequence
  Synthetic polynucleotide
actgcaccagtatgacagta

SEQ ID NO: 144 - DNA, 20 bp, Artificial Sequence
  Synthetic polynucleotide
taataactagaagcagacag

SEQ ID NO: 145 - DNA, 20 bp, Artificial Sequence
  Synthetic polynucleotide
tatattctcgtctaatacgt

SEQ ID NO: 146 - DNA, 20 bp, Artificial Sequence
  Synthetic polynucleotide
acatagctttatgtccatgt

SEQ ID NO: 147 - DNA, 20 bp, Artificial Sequence
  Synthetic polynucleotide
acgatgcgcgaaggttattc

SEQ ID NO: 148 - DNA, 20 bp, Artificial Sequence
  Synthetic polynucleotide
atttatcgctaacggatttc

SEQ ID NO: 149 - DNA, 20 bp, Artificial Sequence
  Synthetic polynucleotide
aaagcacaattcggataatt

SEQ ID NO: 150 - DNA, 20 bp, Artificial Sequence
  Synthetic polynucleotide
accaggcaaagacactctct

SEQ ID NO: 151 - DNA, 20 bp, Artificial Sequence
  Synthetic polynucleotide
aaaccacataaggaaatttg

SEQ ID NO: 152 - DNA, 20 bp, Artificial Sequence
  Synthetic polynucleotide
cacttcctagtggcaataat

SEQ ID NO: 153 - DNA, 20 bp, Artificial Sequence
  Synthetic polynucleotide
cccagtcaaggtttattcaa

SEQ ID NO: 154 - DNA, 20 bp, Artificial Sequence
  Synthetic polynucleotide
caaacccgctgtctagctct

SEQ ID NO: 155 - DNA, 20 bp, Artificial Sequence
  Synthetic polynucleotide
ccctaacagtgctcttcgtg

SEQ ID NO: 156 - DNA, 20 bp, Artificial Sequence
  Synthetic polynucleotide
ttaacccctgagattggaat

SEQ ID NO: 157 - DNA, 20 bp, Artificial Sequence
  Synthetic polynucleotide
aaacatcgaataacgcgtag

SEQ ID NO: 158 - DNA, 20 bp, Artificial Sequence
  Synthetic polynucleotide
atatcccaccgtggttcaga

SEQ ID NO: 159 - DNA, 20 bp, Artificial Sequence
  Synthetic polynucleotide
cctcaactatacatccgtgc

SEQ ID NO: 160 - DNA, 20 bp, Artificial Sequence
  Synthetic polynucleotide
cagattcaacacaagcctgc

SEQ ID NO: 161 - DNA, 20 bp, Artificial Sequence
  Synthetic polynucleotide
ttatatcatcagatcaccac

SEQ ID NO: 162 - DNA, 20 bp, Artificial Sequence
  Synthetic polynucleotide
caccgtccgcgcggttaata

SEQ ID NO: 163 - DNA, 20 bp, Artificial Sequence
  Synthetic polynucleotide
actatgcatctggcctttaa

SEQ ID NO: 164 - DNA, 20 bp, Artificial Sequence
  Synthetic polynucleotide
ccgacccctcagctatttca

SEQ ID NO: 165 - DNA, 20 bp, Artificial Sequence
  Synthetic polynucleotide
tccccaccatccatggttat

SEQ ID NO: 166 - DNA, 20 bp, Artificial Sequence
  Synthetic polynucleotide
agtcttcgtctcagctagct

SEQ ID NO: 167 - DNA, 20 bp, Artificial Sequence
  Synthetic polynucleotide
acgtcgctttcagaatttca

SEQ ID NO: 168 - DNA, 20 bp, Artificial Sequence
  Synthetic polynucleotide
aatcttcccctgtttcctcc

SEQ ID NO: 169 - DNA, 20 bp, Artificial Sequence
  Synthetic polynucleotide
actacgcccaaaccggctat

SEQ ID NO: 170 - DNA, 20 bp, Artificial Sequence
  Synthetic polynucleotide
gataagcgattatggaatca

SEQ ID NO: 171 - DNA, 20 bp, Artificial Sequence
  Synthetic polynucleotide
aaacctctttcatacacgca

SEQ ID NO: 172 - DNA, 20 bp, Artificial Sequence
  Synthetic polynucleotide
tgtccgcctactcaacacaa

SEQ ID NO: 173 - DNA, 20 bp, Artificial Sequence
  Synthetic polynucleotide
agacatctgtgtacatacat

SEQ ID NO: 174 - DNA, 20 bp, Artificial Sequence
  Synthetic polynucleotide
aaaagtcctcctttcaccac

SEQ ID NO: 175 - DNA, 20 bp, Artificial Sequence
  Synthetic polynucleotide
ccatcactcctaaagacgac

SEQ ID NO: 176 - DNA, 20 bp, Artificial Sequence
  Synthetic polynucleotide
atcacccgaagtcctaccga

SEQ ID NO: 177 - DNA, 20 bp, Artificial Sequence
  Synthetic polynucleotide
gaccagcccacacggaaatt

SEQ ID NO: 178 - DNA, 20 bp, Artificial Sequence
  Synthetic polynucleotide
gaatccccctgattctcgct

SEQ ID NO: 179 - DNA, 20 bp, Artificial Sequence
  Synthetic polynucleotide
gtagcactatctctgtctct

SEQ ID NO: 180 - DNA, 20 bp, Artificial Sequence
  Synthetic polynucleotide
tcctatctccgaaccctgaa

SEQ ID NO: 181 - DNA, 20 bp, Artificial Sequence
  Synthetic polynucleotide
cctctgcagtaatttactta

SEQ ID NO: 182 - DNA, 20 bp, Artificial Sequence
  Synthetic polynucleotide
cttctaccttccagtcagtc

SEQ ID NO: 183 - DNA, 20 bp, Artificial Sequence
  Synthetic polynucleotide
tgccttcctcttccacacac

SEQ ID NO: 184 - DNA, 20 bp, Artificial Sequence
  Synthetic polynucleotide
atccttctcaaaagacagac

SEQ ID NO: 185 - DNA, 20 bp, Artificial Sequence
  Synthetic polynucleotide
acgtccccactcgatgaaga

SEQ ID NO: 186 - DNA, 20 bp, Artificial Sequence
  Synthetic polynucleotide
ttaagccacttaatcaccac

SEQ ID NO: 187 - DNA, 20 bp, Artificial Sequence
  Synthetic polynucleotide
cacagtcgagcaattaccga

SEQ ID NO: 188 - DNA, 20 bp, Artificial Sequence
  Synthetic polynucleotide
cacactcccatcgatcccga

SEQ ID NO: 189 - DNA, 20 bp, Artificial Sequence
  Synthetic polynucleotide
aatactctgcgtgagtttag

SEQ ID NO: 190 - DNA, 20 bp, Artificial Sequence
  Synthetic polynucleotide
acataacactccaatttaat

SEQ ID NO: 191 - DNA, 20 bp, Artificial Sequence
  Synthetic polynucleotide
tcaggtcactgctaataaat

SEQ ID NO: 192 - DNA, 20 bp, Artificial Sequence
  Synthetic polynucleotide
ttcaaaccaaaagtaattaa

SEQ ID NO: 193 - DNA, 20 bp, Artificial Sequence
  Synthetic polynucleotide
aaatttcagagaactactat

SEQ ID NO: 194 - DNA, 20 bp, Artificial Sequence
  Synthetic polynucleotide
ataaaactgcgcttggaata

SEQ ID NO: 195 - DNA, 20 bp, Artificial Sequence
  Synthetic polynucleotide
tttcttctagaaggtcaaaa

SEQ ID NO: 196 - DNA, 20 bp, Artificial Sequence
  Synthetic polynucleotide
ttaatacctttactaagaag

SEQ ID NO: 197 - DNA, 20 bp, Artificial Sequence
  Synthetic polynucleotide
atatatcaaactagaaatgt

SEQ ID NO: 198 - DNA, 20 bp, Artificial Sequence
  Synthetic polynucleotide
tagattccctatattgcaat

SEQ ID NO: 199 - DNA, 20 bp, Artificial Sequence
  Synthetic polynucleotide
ttaaatccaaccctatgatg

SEQ ID NO: 200 - DNA, 20 bp, Artificial Sequence
  Synthetic polynucleotide
cctcgtctgaaattcgaaat

SEQ ID NO: 201 - DNA, 20 bp, Artificial Sequence
  Synthetic polynucleotide
aattgtcactttaacccagc

SEQ ID NO: 202 - DNA, 20 bp, Artificial Sequence
  Synthetic polynucleotide
agtatccatatcaagaacga

SEQ ID NO: 203 - DNA, 20 bp, Artificial Sequence
  Synthetic polynucleotide
tacctccaggtattcacggt

SEQ ID NO: 204 - DNA, 20 bp, Artificial Sequence
  Synthetic polynucleotide
ttcaatcttagccctaatta

SEQ ID NO: 205 - DNA, 20 bp, Artificial Sequence
  Synthetic polynucleotide
ccacaaccaataatttattt

SEQ ID NO: 206 - DNA, 20 bp, Artificial Sequence
  Synthetic polynucleotide
ttataacgtttgcttattta

SEQ ID NO: 207 - DNA, 20 bp, Artificial Sequence
  Synthetic polynucleotide
tagcaactggctttcaaaca

SEQ ID NO: 208 - DNA, 20 bp, Artificial Sequence
  Synthetic polynucleotide
tccgacccataggttatata

SEQ ID NO: 209 - DNA, 20 bp, Artificial Sequence
  Synthetic polynucleotide
tccactcgatatggtagttt

SEQ ID NO: 210 - DNA, 20 bp, Artificial Sequence
  Synthetic polynucleotide
aacaacctgtggcaggtata

SEQ ID NO: 211 - DNA, 20 bp, Artificial Sequence
  Synthetic polynucleotide
tcgacaccttaatataacct

SEQ ID NO: 212 - DNA, 20 bp, Artificial Sequence
  Synthetic polynucleotide
aaaaggctattaagggtatc

SEQ ID NO: 213 - DNA, 20 bp, Artificial Sequence
  Synthetic polynucleotide
tcacatcacatccaactaac

SEQ ID NO: 214 - DNA, 20 bp, Artificial Sequence
  Synthetic polynucleotide
ctataacttatagtaccagt

SEQ ID NO: 215 - DNA, 20 bp, Artificial Sequence
  Synthetic polynucleotide
caccaactcaatttgacgtt

SEQ ID NO: 216 - DNA, 20 bp, Artificial Sequence
  Synthetic polynucleotide
cgatctctgaataacacctg

SEQ ID NO: 217 - DNA, 20 bp, Artificial Sequence
  Synthetic polynucleotide
ttacgcccctacgaacgaga

SEQ ID NO: 218 - DNA, 20 bp, Artificial Sequence
  Synthetic polynucleotide
ctgacacgacacttgataga

SEQ ID NO: 219 - DNA, 20 bp, Artificial Sequence
  Synthetic polynucleotide
tgtatacatcaactctttct

SEQ ID NO: 220 - DNA, 20 bp, Artificial Sequence
  Synthetic polynucleotide
gccgtacactgttatttatt

SEQ ID NO: 221 - DNA, 20 bp, Artificial Sequence
  Synthetic polynucleotide
aaagagcacttccattaatt

SEQ ID NO: 222 - DNA, 20 bp, Artificial Sequence
  Synthetic polynucleotide
tgtatacacataaattcttt

SEQ ID NO: 223 - DNA, 20 bp, Artificial Sequence
  Synthetic polynucleotide
tctcaccaaatccatatata

SEQ ID NO: 224 - DNA, 20 bp, Artificial Sequence
  Synthetic polynucleotide
cgtccacactcgggcaattg

SEQ ID NO: 225 - DNA, 20 bp, Artificial Sequence
  Synthetic polynucleotide
gtccctctagcatcgggata

SEQ ID NO: 226 - DNA, 20 bp, Artificial Sequence
  Synthetic polynucleotide
aatatgcattatctacggct

SEQ ID NO: 227 - DNA, 20 bp, Artificial Sequence
  Synthetic polynucleotide
ccgactcgaatgggccaaat

SEQ ID NO: 228 - DNA, 20 bp, Artificial Sequence
  Synthetic polynucleotide
atacttccaggtttatagcg

SEQ ID NO: 229 - DNA, 20 bp, Artificial Sequence
  Synthetic polynucleotide
caccacctatttctaacgct

SEQ ID NO: 230 - DNA, 20 bp, Artificial Sequence
  Synthetic polynucleotide
ccatcccttaacatatgaac

SEQ ID NO: 231 - DNA, 20 bp, Artificial Sequence
  Synthetic polynucleotide
agcatccatcaaacatgaga

SEQ ID NO: 232 - DNA, 20 bp, Artificial Sequence
  Synthetic polynucleotide
acgctacttaggcacctaga

SEQ ID NO: 233 - DNA, 20 bp, Artificial Sequence
  Synthetic polynucleotide
tatgcgcctgacataacgac

SEQ ID NO: 234 - DNA, 20 bp, Artificial Sequence
  Synthetic polynucleotide
agtcaactgatttcctttcc

SEQ ID NO: 235 - DNA, 20 bp, Artificial Sequence
  Synthetic polynucleotide
gctcctcttgggtctttaat

SEQ ID NO: 236 - DNA, 20 bp, Artificial Sequence
  Synthetic polynucleotide
aatcagcgcctgcattaatt

SEQ ID NO: 237 - DNA, 20 bp, Artificial Sequence
  Synthetic polynucleotide
caacaacacctattgtaaat

SEQ ID NO: 238 - DNA, 20 bp, Artificial Sequence
  Synthetic polynucleotide
gtaaagcttaaccatttacc

SEQ ID NO: 239 - DNA, 20 bp, Artificial Sequence
  Synthetic polynucleotide
actcgtcatcttattgtttg

SEQ ID NO: 240 - DNA, 20 bp, Artificial Sequence
  Synthetic polynucleotide
attccgccacacaatcaatc

SEQ ID NO: 241 - DNA, 20 bp, Artificial Sequence
  Synthetic polynucleotide
ttcacaccgtcaactgttgc

SEQ ID NO: 242 - DNA, 20 bp, Artificial Sequence
  Synthetic polynucleotide
tgttgccctgataattctcc

SEQ ID NO: 243 - DNA, 20 bp, Artificial Sequence
  Synthetic polynucleotide
tacctgcatcccctgctagc

SEQ ID NO: 244 - DNA, 20 bp, Artificial Sequence
  Synthetic polynucleotide
aatacccaaaattccgaaag

SEQ ID NO: 245 - DNA, 20 bp, Artificial Sequence
  Synthetic polynucleotide
cgtccccgtattacctgggc

SEQ ID NO: 246 - DNA, 20 bp, Artificial Sequence
  Synthetic polynucleotide
taacaacaagaagttatcga

SEQ ID NO: 247 - DNA, 20 bp, Artificial Sequence
  Synthetic polynucleotide
agatgccgtctaacccgaac

SEQ ID NO: 248 - DNA, 20 bp, Artificial Sequence
  Synthetic polynucleotide
cttaagccgtataattacgt

SEQ ID NO: 249 - DNA, 20 bp, Artificial Sequence
  Synthetic polynucleotide
accccactattagtctatct

SEQ ID NO: 250 - DNA, 20 bp, Artificial Sequence
  Synthetic polynucleotide
cctccgcagcttagctattt

SEQ ID NO: 251 - DNA, 20 bp, Artificial Sequence
  Synthetic polynucleotide
aacccccacccgccttgttt

SEQ ID NO: 252 - DNA, 20 bp, Artificial Sequence
  Synthetic polynucleotide
cgcctacgacccctttattt

SEQ ID NO: 253 - DNA, 20 bp, Artificial Sequence
  Synthetic polynucleotide
acttcgccatgtcctcaatg

SEQ ID NO: 254 - DNA, 20 bp, Artificial Sequence
  Synthetic polynucleotide
cgctatcccccagcgccaca

SEQ ID NO: 255 - DNA, 20 bp, Artificial Sequence
  Synthetic polynucleotide
gtgcgccaagtacatcaatc

SEQ ID NO: 256 - DNA, 20 bp, Artificial Sequence
  Synthetic polynucleotide
tcccttcatctctgtatgta

SEQ ID NO: 257 - DNA, 20 bp, Artificial Sequence
  Synthetic polynucleotide
tgcacgccccacctaaaaaa

SEQ ID NO: 258 - DNA, 20 bp, Artificial Sequence
  Synthetic polynucleotide
atcgtccccagacacgcgat

SEQ ID NO: 259 - DNA, 20 bp, Artificial Sequence
  Synthetic polynucleotide
tctctacccatgaactaagg

SEQ ID NO: 260 - DNA, 20 bp, Artificial Sequence
  Synthetic polynucleotide
cctctcctaagccccccaag

SEQ ID NO: 261 - DNA, 20 bp, Artificial Sequence
  Synthetic polynucleotide
ctcacacgagtatccccagt

SEQ ID NO: 262 - DNA, 20 bp, Artificial Sequence
  Synthetic polynucleotide
ccgtctcctgcaatctcagc

SEQ ID NO: 263 - DNA, 20 bp, Artificial Sequence
  Synthetic polynucleotide
tacacacaattctacgaggt

SEQ ID NO: 264 - DNA, 20 bp, Artificial Sequence
  Synthetic polynucleotide
aattgcccattcattaatta

SEQ ID NO: 265 - DNA, 20 bp, Artificial Sequence
  Synthetic polynucleotide
agtaaaccttcaactattta

SEQ ID NO: 266 - DNA, 20 bp, Artificial Sequence
  Synthetic polynucleotide
aaattacttcgaaaattatt

SEQ ID NO: 267 - DNA, 20 bp, Artificial Sequence
  Synthetic polynucleotide
aaacaactagtagtttgttt

SEQ ID NO: 268 - DNA, 20 bp, Artificial Sequence
  Synthetic polynucleotide
tactatcacaacattgattt

SEQ ID NO: 269 - DNA, 20 bp, Artificial Sequence
  Synthetic polynucleotide
tgagcactaagtatattgca

SEQ ID NO: 270 - DNA, 20 bp, Artificial Sequence
  Synthetic polynucleotide
aaatagctagatgatggtcg

SEQ ID NO: 271 - DNA, 20 bp, Artificial Sequence
  Synthetic polynucleotide
ttctaactcggaactaagaa

SEQ ID NO: 272 - DNA, 20 bp, Artificial Sequence
  Synthetic polynucleotide
taaattcaaaaaatgtttgc

SEQ ID NO: 273 - DNA, 20 bp, Artificial Sequence
  Synthetic polynucleotide
caacatctcacttaaccctt

SEQ ID NO: 274 - DNA, 20 bp, Artificial Sequence
  Synthetic polynucleotide
taatgtcctatagcgcacaa

SEQ ID NO: 275 - DNA, 20 bp, Artificial Sequence
  Synthetic polynucleotide
taagaccatcttctctggtg

SEQ ID NO: 276 - DNA, 20 bp, Artificial Sequence
  Synthetic polynucleotide
aatacgcattaatgtagcga

SEQ ID NO: 277 - DNA, 20 bp, Artificial Sequence
  Synthetic polynucleotide
agtaaactctttagcaacgc

SEQ ID NO: 278 - DNA, 20 bp, Artificial Sequence
  Synthetic polynucleotide
tatatccctacatacaacag

SEQ ID NO: 279 - DNA, 20 bp, Artificial Sequence
  Synthetic polynucleotide
cctccccatttaattattat

SEQ ID NO: 280 - DNA, 20 bp, Artificial Sequence
  Synthetic polynucleotide
gcttaacaagacttctttca

SEQ ID NO: 281 - DNA, 20 bp, Artificial Sequence
  Synthetic polynucleotide
tgtccccaaaaaattaatta

SEQ ID NO: 282 - DNA, 20 bp, Artificial Sequence
  Synthetic polynucleotide
catccccccctgatgattta

SEQ ID NO: 283 - DNA, 20 bp, Artificial Sequence
  Synthetic polynucleotide
tacaatcgagtaataattat

SEQ ID NO: 284 - DNA, 20 bp, Artificial Sequence
  Synthetic polynucleotide
acccctcatatagatataag

SEQ ID NO: 285 - DNA, 20 bp, Artificial Sequence
  Synthetic polynucleotide
gacaaaccacctgtcggtat

SEQ ID NO: 286 - DNA, 20 bp, Artificial Sequence
  Synthetic polynucleotide
tggataccgacatgcaatta

SEQ ID NO: 287 - DNA, 20 bp, Artificial Sequence
  Synthetic polynucleotide
aatgaccaatatagatctag

SEQ ID NO: 288 - DNA, 20 bp, Artificial Sequence
  Synthetic polynucleotide
aattgcccaaacttcacttc

SEQ ID NO: 289 - DNA, 20 bp, Artificial Sequence
  Synthetic polynucleotide
tcctttcatcccaatagaga

SEQ ID NO: 290 - DNA, 20 bp, Artificial Sequence
  Synthetic polynucleotide
ttgcacccatatcatacatc

SEQ ID NO: 291 - DNA, 20 bp, Artificial Sequence
  Synthetic polynucleotide
atttcacgatatatcaaggc

SEQ ID NO: 292 - DNA, 20 bp, Artificial Sequence
  Synthetic polynucleotide
atcgaacattaaattacgga

SEQ ID NO: 293 - DNA, 20 bp, Artificial Sequence
  Synthetic polynucleotide
cacttactatacgaaccgaa

SEQ ID NO: 294 - DNA, 20 bp, Artificial Sequence
  Synthetic polynucleotide
gcccaactgctagattaaat

SEQ ID NO: 295 - DNA, 20 bp, Artificial Sequence
  Synthetic polynucleotide
atgcttccttcctattatta

SEQ ID NO: 296 - DNA, 20 bp, Artificial Sequence
  Synthetic polynucleotide
cctgtacataaaggatattt

SEQ ID NO: 297 - DNA, 20 bp, Artificial Sequence
  Synthetic polynucleotide
ataaagctctgtcgttaata

SEQ ID NO: 298 - DNA, 20 bp, Artificial Sequence
  Synthetic polynucleotide
cccgtacagccctaaataaa

SEQ ID NO: 299 - DNA, 20 bp, Artificial Sequence
  Synthetic polynucleotide
ctctgtcatagtttgttaaa

SEQ ID NO: 300 - DNA, 20 bp, Artificial Sequence
  Synthetic polynucleotide
cccaccccacaagtgtaagt

SEQ ID NO: 301 - DNA, 20 bp, Artificial Sequence
  Synthetic polynucleotide
gcaaagcacgtaaggtccat

SEQ ID NO: 302 - DNA, 20 bp, Artificial Sequence
  Synthetic polynucleotide
tcttcccgtatcttagaacc

SEQ ID NO: 303 - DNA, 20 bp, Artificial Sequence
  Synthetic polynucleotide
aatctacacatttaagcgtg

SEQ ID NO: 304 - DNA, 20 bp, Artificial Sequence
  Synthetic polynucleotide
gcataccaaccctttaagta

SEQ ID NO: 305 - DNA, 20 bp, Artificial Sequence
  Synthetic polynucleotide
tggtcacttcagtatatagc

SEQ ID NO: 306 - DNA, 20 bp, Artificial Sequence
  Synthetic polynucleotide
catgatcaagtcaaccatgt

SEQ ID NO: 307 - DNA, 20 bp, Artificial Sequence
  Synthetic polynucleotide
taagcacagaattccaggaa

SEQ ID NO: 308 - DNA, 20 bp, Artificial Sequence
  Synthetic polynucleotide
cgtcacctcgatcgtcgaga

SEQ ID NO: 309 - DNA, 20 bp, Artificial Sequence
  Synthetic polynucleotide
accccccttagggggtttat

SEQ ID NO: 310 - DNA, 20 bp, Artificial Sequence
  Synthetic polynucleotide
catatacagcaagcatattg

SEQ ID NO: 311 - DNA, 20 bp, Artificial Sequence
  Synthetic polynucleotide
gcctttcaccagatatttag

SEQ ID NO: 312 - DNA, 20 bp, Artificial Sequence
  Synthetic polynucleotide
tggcatcccgccttatagat

SEQ ID NO: 313 - DNA, 20 bp, Artificial Sequence
  Synthetic polynucleotide
ccccgcctacatacctaact

SEQ ID NO: 314 - DNA, 20 bp, Artificial Sequence
  Synthetic polynucleotide
aagatccctcaccttctctt

SEQ ID NO: 315 - DNA, 20 bp, Artificial Sequence
  Synthetic polynucleotide
aaaacccggataccaaatcg

SEQ ID NO: 316 - DNA, 20 bp, Artificial Sequence
  Synthetic polynucleotide
gcgtctccatattagtttag

SEQ ID NO: 317 - DNA, 20 bp, Artificial Sequence
  Synthetic polynucleotide
attccacccccggacatctg

SEQ ID NO: 318 - DNA, 20 bp, Artificial Sequence
  Synthetic polynucleotide
gagctgccatcctagcagta

SEQ ID NO: 319 - DNA, 20 bp, Artificial Sequence
  Synthetic polynucleotide
gtaacaccataaatactatg

SEQ ID NO: 320 - DNA, 20 bp, Artificial Sequence
  Synthetic polynucleotide
ccaaaactcatccataccct

SEQ ID NO: 321 - DNA, 20 bp, Artificial Sequence
  Synthetic polynucleotide
aggtcaccataaatcatggg

SEQ ID NO: 322 - DNA, 20 bp, Artificial Sequence
  Synthetic polynucleotide
gaatgccaaggtaaaaaggt

SEQ ID NO: 323 - DNA, 20 bp, Artificial Sequence
  Synthetic polynucleotide
cgtagaccagtgacaccgtg

SEQ ID NO: 324 - DNA, 20 bp, Artificial Sequence
  Synthetic polynucleotide
tccactcgtcaaaaatttca

SEQ ID NO: 325 - DNA, 20 bp, Artificial Sequence
  Synthetic polynucleotide
tcctctcggccggaatcttt

SEQ ID NO: 326 - DNA, 20 bp, Artificial Sequence
  Synthetic polynucleotide
gctactctcccctcttaatt

SEQ ID NO: 327 - DNA, 20 bp, Artificial Sequence
  Synthetic polynucleotide
tgatctctcctctcttccta

SEQ ID NO: 328 - DNA, 20 bp, Artificial Sequence
  Synthetic polynucleotide
caccgcccatccgtacttag

SEQ ID NO: 329 - DNA, 20 bp, Artificial Sequence
  Synthetic polynucleotide
cccattccgcaactactgcg

SEQ ID NO: 330 - DNA, 20 bp, Artificial Sequence
  Synthetic polynucleotide
cacccgcacctacaaaggtt

SEQ ID NO: 331 - DNA, 20 bp, Artificial Sequence
  Synthetic polynucleotide
ccgaccccgaagccctcgca

SEQ ID NO: 332 - DNA, 20 bp, Artificial Sequence
  Synthetic polynucleotide
actccaccctctcggcctga

SEQ ID NO: 333 - DNA, 20 bp, Artificial Sequence
  Synthetic polynucleotide
tttctccccccatgccatga

SEQ ID NO: 334 - DNA, 20 bp, Artificial Sequence
  Synthetic polynucleotide
atatgcctacgtaacaagcg

SEQ ID NO: 335 - DNA, 20 bp, Artificial Sequence
  Synthetic polynucleotide
cctacactattcacgtctgg

SEQ ID NO: 336 - DNA, 20 bp, Artificial Sequence
  Synthetic polynucleotide
cagcatcgtatcacaaccgt

SEQ ID NO: 337 - DNA, 20 bp, Artificial Sequence
  Synthetic polynucleotide
aaccaacagacacctacggg

SEQ ID NO: 338 - DNA, 20 bp, Artificial Sequence
  Synthetic polynucleotide
gcatctcactcgactaacgg

SEQ ID NO: 339 - DNA, 20 bp, Artificial Sequence
  Synthetic polynucleotide
ttactcctgtgtgatttaaa

SEQ ID NO: 340 - DNA, 20 bp, Artificial Sequence
  Synthetic polynucleotide
caatatctgcctatttattg

SEQ ID NO: 341 - DNA, 20 bp, Artificial Sequence
  Synthetic polynucleotide
aaacttcaaccaatataaat

SEQ ID NO: 342 - DNA, 20 bp, Artificial Sequence
  Synthetic polynucleotide
caatatcctgtaatataatc

SEQ ID NO: 343 - DNA, 20 bp, Artificial Sequence
  Synthetic polynucleotide
aagcaacaaaatttgaattt

SEQ ID NO: 344 - DNA, 20 bp, Artificial Sequence
  Synthetic polynucleotide
acaattcacccctcgattca

SEQ ID NO: 345 - DNA, 20 bp, Artificial Sequence
  Synthetic polynucleotide
atcaaacgtcaagaatgtct

SEQ ID NO: 346 - DNA, 20 bp, Artificial Sequence
  Synthetic polynucleotide
tttgcacaaaagttagtaaa

SEQ ID NO: 347 - DNA, 20 bp, Artificial Sequence
  Synthetic polynucleotide
tctctaccattacattcata

SEQ ID NO: 348 - DNA, 20 bp, Artificial Sequence
  Synthetic polynucleotide
taatagcttgggttgtacca

SEQ ID NO: 349 - DNA, 20 bp, Artificial Sequence
  Synthetic polynucleotide
cgtaatctcgtatttctgac

SEQ ID NO: 350 - DNA, 20 bp, Artificial Sequence
  Synthetic polynucleotide
tcagtacaaatgagagtatc

SEQ ID NO: 351 - DNA, 20 bp, Artificial Sequence
  Synthetic polynucleotide
tgaacacattaatatgacac

SEQ ID NO: 352 - DNA, 20 bp, Artificial Sequence
  Synthetic polynucleotide
atttcacaatctggcaacga

SEQ ID NO: 353 - DNA, 20 bp, Artificial Sequence
  Synthetic polynucleotide
cgattacattaatagacggc

SEQ ID NO: 354 - DNA, 20 bp, Artificial Sequence
  Synthetic polynucleotide
cctctacaacagacttattg

SEQ ID NO: 355 - DNA, 20 bp, Artificial Sequence
  Synthetic polynucleotide
agcgccctatgggcataatt

SEQ ID NO: 356 - DNA, 20 bp, Artificial Sequence
  Synthetic polynucleotide
cataatcatttctaatttaa

SEQ ID NO: 357 - DNA, 20 bp, Artificial Sequence
  Synthetic polynucleotide
tcacgaccattcctgattag

SEQ ID NO: 358 - DNA, 20 bp, Artificial Sequence
  Synthetic polynucleotide
atgtaactttggttgtttac

SEQ ID NO: 359 - DNA, 20 bp, Artificial Sequence
  Synthetic polynucleotide
gggtctcgatcattattata

SEQ ID NO: 360 - DNA, 20 bp, Artificial Sequence
  Synthetic polynucleotide
tcctatcctccgatcgcctt

SEQ ID NO: 361 - DNA, 20 bp, Artificial Sequence
  Synthetic polynucleotide
gttataccggttatacaatg

SEQ ID NO: 362 - DNA, 20 bp, Artificial Sequence
  Synthetic polynucleotide
atattcccagtataattaca

SEQ ID NO: 363 - DNA, 20 bp, Artificial Sequence
  Synthetic polynucleotide
ccaattctaagagaaacctc

SEQ ID NO: 364 - DNA, 20 bp, Artificial Sequence
  Synthetic polynucleotide
ttcattccaacgtattaagg

SEQ ID NO: 365 - DNA, 20 bp, Artificial Sequence
  Synthetic polynucleotide
taagatcaaaattaatgacc

SEQ ID NO: 366 - DNA, 20 bp, Artificial Sequence
  Synthetic polynucleotide
caggtacttgtacaaccgtg

SEQ ID NO: 367 - DNA, 20 bp, Artificial Sequence
  Synthetic polynucleotide
tagaaacttcctaaaaacgc

SEQ ID NO: 368 - DNA, 20 bp, Artificial Sequence
  Synthetic polynucleotide
tacactctctagaccattga

SEQ ID NO: 369 - DNA, 20 bp, Artificial Sequence
  Synthetic polynucleotide
agctccctactttctttaaa

SEQ ID NO: 370 - DNA, 20 bp, Artificial Sequence
  Synthetic polynucleotide
acgagcccctggctttaaat

SEQ ID NO: 371 - DNA, 20 bp, Artificial Sequence
  Synthetic polynucleotide
tcttatctcacattcttgct

SEQ ID NO: 372 - DNA, 20 bp, Artificial Sequence
  Synthetic polynucleotide
aagctccatgcacgcttatg

SEQ ID NO: 373 - DNA, 20 bp, Artificial Sequence
  Synthetic polynucleotide
tctttacagttaattatatc

SEQ ID NO: 374 - DNA, 20 bp, Artificial Sequence
  Synthetic polynucleotide
ttctgacaactcaagtttcg

SEQ ID NO: 375 - DNA, 20 bp, Artificial Sequence
  Synthetic polynucleotide
ctataacgacattcatcata

SEQ ID NO: 376 - DNA, 20 bp, Artificial Sequence
  Synthetic polynucleotide
acaacgccgtagtataggtt

SEQ ID NO: 377 - DNA, 20 bp, Artificial Sequence
  Synthetic polynucleotide
gggtctcgggaaagaaattc

SEQ ID NO: 378 - DNA, 20 bp, Artificial Sequence
  Synthetic polynucleotide
tgatcccccacaatgttggg

SEQ ID NO: 379 - DNA, 20 bp, Artificial Sequence
  Synthetic polynucleotide
tttcgtctcgtttacccgaa

SEQ ID NO: 380 - DNA, 20 bp, Artificial Sequence
  Synthetic polynucleotide
acggttctcacctattcacg

SEQ ID NO: 381 - DNA, 20 bp, Artificial Sequence
  Synthetic polynucleotide
cccactcaaaattacgtagt

SEQ ID NO: 382 - DNA, 20 bp, Artificial Sequence
  Synthetic polynucleotide
atactccctataacctctga

SEQ ID NO: 383 - DNA, 20 bp, Artificial Sequence
  Synthetic polynucleotide
cctttcccgaaacaaatggt

SEQ ID NO: 384 - DNA, 20 bp, Artificial Sequence
  Synthetic polynucleotide
tacgcccgccttagttattc

SEQ ID NO: 385 - DNA, 20 bp, Artificial Sequence
  Synthetic polynucleotide
atctgacgattctaatttaa

SEQ ID NO: 386 - DNA, 20 bp, Artificial Sequence
  Synthetic polynucleotide
ccgctgctgccttgatttcc

SEQ ID NO: 387 - DNA, 20 bp, Artificial Sequence
  Synthetic polynucleotide
gtcccccttccttaatttgt

SEQ ID NO: 388 - DNA, 20 bp, Artificial Sequence
  Synthetic polynucleotide
cgcttacggggtacccttta

SEQ ID NO: 389 - DNA, 20 bp, Artificial Sequence
  Synthetic polynucleotide
tccccacggctcgccattat

SEQ ID NO: 390 - DNA, 20 bp, Artificial Sequence
  Synthetic polynucleotide
ctaaccccagctgcgtatag

SEQ ID NO: 391 - DNA, 20 bp, Artificial Sequence
  Synthetic polynucleotide
tacgaacacatagaacgtcc

SEQ ID NO: 392 - DNA, 20 bp, Artificial Sequence
  Synthetic polynucleotide
tcacccccctctaacccctg

SEQ ID NO: 393 - DNA, 20 bp, Artificial Sequence
  Synthetic polynucleotide
tgatcgcaggataaaaacct

SEQ ID NO: 394 - DNA, 20 bp, Artificial Sequence
  Synthetic polynucleotide
gcacatctaagtcgcatgtt

SEQ ID NO: 395 - DNA, 20 bp, Artificial Sequence
  Synthetic polynucleotide
atgttccgaaaaaaaccgta

SEQ ID NO: 396 - DNA, 20 bp, Artificial Sequence
  Synthetic polynucleotide
acaagtccgaatactacgta

SEQ ID NO: 397 - DNA, 20 bp, Artificial Sequence
  Synthetic polynucleotide
actaaccaatacaagccagg

SEQ ID NO: 398 - DNA, 20 bp, Artificial Sequence
  Synthetic polynucleotide
cacatacttctttgctcagg

SEQ ID NO: 399 - DNA, 20 bp, Artificial Sequence
  Synthetic polynucleotide
actgggcgcccccccctttg

SEQ ID NO: 400 - DNA, 20 bp, Artificial Sequence
  Synthetic polynucleotide
agcgcaccccgcctacttct

SEQ ID NO: 401 - DNA, 20 bp, Artificial Sequence
  Synthetic polynucleotide
accaaaccgcgacatatttc

SEQ ID NO: 402 - DNA, 20 bp, Artificial Sequence
  Synthetic polynucleotide
gctcacctcctgtgttaaat

SEQ ID NO: 403 - DNA, 20 bp, Artificial Sequence
  Synthetic polynucleotide
cgcccccgactcacctaatt

SEQ ID NO: 404 - DNA, 20 bp, Artificial Sequence
  Synthetic polynucleotide
tcccatctatcaactgattg

SEQ ID NO: 405 - DNA, 20 bp, Artificial Sequence
  Synthetic polynucleotide
ccgccccgcctgtttaatga

SEQ ID NO: 406 - DNA, 20 bp, Artificial Sequence
  Synthetic polynucleotide
tcactccccatctacgttgg

SEQ ID NO: 407 - DNA, 20 bp, Artificial Sequence
  Synthetic polynucleotide
tcgcgcccgcaccacttgtt

SEQ ID NO: 408 - DNA, 20 bp, Artificial Sequence
  Synthetic polynucleotide
caccctcctagcttcctgag

SEQ ID NO: 409 - DNA, 20 bp, Artificial Sequence
  Synthetic polynucleotide
acagatctcataatgtggga

SEQ ID NO: 410 - DNA, 20 bp, Artificial Sequence
  Synthetic polynucleotide
gaccctcttactagtatggg

SEQ ID NO: 411 - DNA, 20 bp, Artificial Sequence
  Synthetic polynucleotide
aaatcgcatccaattcctgc

SEQ ID NO: 412 - DNA, 20 bp, Artificial Sequence
  Synthetic polynucleotide
gacatccactagcctccggg

SEQ ID NO: 413 - DNA, 20 bp, Artificial Sequence
  Synthetic polynucleotide
accgttccttcatccacggc

SEQ ID NO: 414 - DNA, 20 bp, Artificial Sequence
  Synthetic polynucleotide
atatatcgtatatcatattt

SEQ ID NO: 415 - DNA, 20 bp, Artificial Sequence
  Synthetic polynucleotide
ttcttgcttaacaaatttca

SEQ ID NO: 416 - DNA, 20 bp, Artificial Sequence
  Synthetic polynucleotide
cctattccacaacattataa

SEQ ID NO: 417 - DNA, 20 bp, Artificial Sequence
  Synthetic polynucleotide
aatactcttacaataaattt

SEQ ID NO: 418 - DNA, 20 bp, Artificial Sequence
  Synthetic polynucleotide
tctaatcctttctcatataa

SEQ ID NO: 419 - DNA, 20 bp, Artificial Sequence
  Synthetic polynucleotide
agattacctcatttatataa

SEQ ID NO: 420 - DNA, 20 bp, Artificial Sequence
  Synthetic polynucleotide
atttacctgataactcaaag

SEQ ID NO: 421 - DNA, 20 bp, Artificial Sequence
  Synthetic polynucleotide
tgaatacctaacaaactaga

SEQ ID NO: 422 - DNA, 20 bp, Artificial Sequence
  Synthetic polynucleotide
tacatacgaaaaacaagttt

SEQ ID NO: 423 - DNA, 20 bp, Artificial Sequence
  Synthetic polynucleotide
agttgacccacataaccatg

SEQ ID NO: 424 - DNA, 20 bp, Artificial Sequence
  Synthetic polynucleotide
cataaccatagaaccattgt

SEQ ID NO: 425 - DNA, 20 bp, Artificial Sequence
  Synthetic polynucleotide
tgtttgcaaaaaattattgt

SEQ ID NO: 426 - DNA, 20 bp, Artificial Sequence
  Synthetic polynucleotide
ttatgacatacccttacgga

SEQ ID NO: 427 - DNA, 20 bp, Artificial Sequence
  Synthetic polynucleotide
gtattacataaccttaccgt

SEQ ID NO: 428 - DNA, 20 bp, Artificial Sequence
  Synthetic polynucleotide
aaaacgcacaataaaacagg

SEQ ID NO: 429 - DNA, 20 bp, Artificial Sequence
  Synthetic polynucleotide
accctccactaatcctattt

SEQ ID NO: 430 - DNA, 20 bp, Artificial Sequence
  Synthetic polynucleotide
catttccttaaacatatttg

SEQ ID NO: 431 - DNA, 20 bp, Artificial Sequence
  Synthetic polynucleotide
gaatttcctttaatatattg

SEQ ID NO: 432 - DNA, 20 bp, Artificial Sequence
  Synthetic polynucleotide
gtccagccaccttctataaa

SEQ ID NO: 433 - DNA, 20 bp, Artificial Sequence
  Synthetic polynucleotide
ttagagcgttaacgtaaaag

SEQ ID NO: 434 - DNA, 20 bp, Artificial Sequence
  Synthetic polynucleotide
tatactccaagccctcataa

SEQ ID NO: 435 - DNA, 20 bp, Artificial Sequence
  Synthetic polynucleotide
ccgttactcctcgctccgta

SEQ ID NO: 436 - DNA, 20 bp, Artificial Sequence
  Synthetic polynucleotide
aaagtcctcatcatacaatg

SEQ ID NO: 437 - DNA, 20 bp, Artificial Sequence
  Synthetic polynucleotide
gtcgaccagaatccgctttg

SEQ ID NO: 438 - DNA, 20 bp, Artificial Sequence
  Synthetic polynucleotide
gtagtcctaaattattcact

SEQ ID NO: 439 - DNA, 20 bp, Artificial Sequence
  Synthetic polynucleotide
gaactacaatatcaatatgg

SEQ ID NO: 440 - DNA, 20 bp, Artificial Sequence
  Synthetic polynucleotide
gattaacttcaccaaattgg

SEQ ID NO: 441 - DNA, 20 bp, Artificial Sequence
  Synthetic polynucleotide
atctaccccaagtacattgg

SEQ ID NO: 442 - DNA, 20 bp, Artificial Sequence
  Synthetic polynucleotide
caaacaccaattccaccgta

SEQ ID NO: 443 - DNA, 20 bp, Artificial Sequence
  Synthetic polynucleotide
tacgtacagtgtagaaccaa

SEQ ID NO: 444 - DNA, 20 bp, Artificial Sequence
  Synthetic polynucleotide
tcgcttcgctctcgtaaatt

SEQ ID NO: 445 - DNA, 20 bp, Artificial Sequence
  Synthetic polynucleotide
ccatgcctgagcgctaaatt

SEQ ID NO: 446 - DNA, 20 bp, Artificial Sequence
  Synthetic polynucleotide
gaaattctggatatcatttg

SEQ ID NO: 447 - DNA, 20 bp, Artificial Sequence
  Synthetic polynucleotide
agattgccgttgttgttaat

SEQ ID NO: 448 - DNA, 20 bp, Artificial Sequence
  Synthetic polynucleotide
cagcaaccactttataaaaa

SEQ ID NO: 449 - DNA, 20 bp, Artificial Sequence
  Synthetic polynucleotide
acacggctaaaataacattg

SEQ ID NO: 450 - DNA, 20 bp, Artificial Sequence
  Synthetic polynucleotide
cgcgacctagactctattaa

SEQ ID NO: 451 - DNA, 20 bp, Artificial Sequence
  Synthetic polynucleotide
acatggcatactttaatcct

SEQ ID NO: 452 - DNA, 20 bp, Artificial Sequence
  Synthetic polynucleotide
ttacatcccttcatacttga

SEQ ID NO: 453 - DNA, 20 bp, Artificial Sequence
  Synthetic polynucleotide
ccctttccaacgagtacaaa

SEQ ID NO: 454 - DNA, 20 bp, Artificial Sequence
  Synthetic polynucleotide
attggacacaaccaactggg

SEQ ID NO: 455 - DNA, 20 bp, Artificial Sequence
  Synthetic polynucleotide
atatttcacttaatatccgg

SEQ ID NO: 456 - DNA, 20 bp, Artificial Sequence
  Synthetic polynucleotide
cctgtactatctttaacaga

SEQ ID NO: 457 - DNA, 20 bp, Artificial Sequence
  Synthetic polynucleotide
caatcccatctccaacgaga

SEQ ID NO: 458 - DNA, 20 bp, Artificial Sequence
  Synthetic polynucleotide
tcaagacacacattcccagt

SEQ ID NO: 459 - DNA, 20 bp, Artificial Sequence
  Synthetic polynucleotide
ctttctcacgcaactaaatt

SEQ ID NO: 460 - DNA, 20 bp, Artificial Sequence
  Synthetic polynucleotide
ccctgactctgcatatttaa

SEQ ID NO: 461 - DNA, 20 bp, Artificial Sequence
  Synthetic polynucleotide
gcgaaccccttagctctttg

SEQ ID NO: 462 - DNA, 20 bp, Artificial Sequence
  Synthetic polynucleotide
gaaatacagtatctattgct

SEQ ID NO: 463 - DNA, 20 bp, Artificial Sequence
  Synthetic polynucleotide
agactactgttgagatattc

SEQ ID NO: 464 - DNA, 20 bp, Artificial Sequence
  Synthetic polynucleotide
cctcaccccctctgcaattt

SEQ ID NO: 465 - DNA, 20 bp, Artificial Sequence
  Synthetic polynucleotide
cgtaggcataaaagtaacta

SEQ ID NO: 466 - DNA, 20 bp, Artificial Sequence
  Synthetic polynucleotide
cgcgcccctcgtcaagattg

SEQ ID NO: 467 - DNA, 20 bp, Artificial Sequence
  Synthetic polynucleotide
ttgtcgcattgattattact

SEQ ID NO: 468 - DNA, 20 bp, Artificial Sequence
  Synthetic polynucleotide
tccacaccgataaatttggt

SEQ ID NO: 469 - DNA, 20 bp, Artificial Sequence
  Synthetic polynucleotide
actagcccacacgtatatgg

SEQ ID NO: 470 - DNA, 20 bp, Artificial Sequence
  Synthetic polynucleotide
gtgcagcctctcttacaggt

SEQ ID NO: 471 - DNA, 20 bp, Artificial Sequence
  Synthetic polynucleotide
ttgctgcgtccaatcctaga

SEQ ID NO: 472 - DNA, 20 bp, Artificial Sequence
  Synthetic polynucleotide
ctcccacgatctaacatggt

SEQ ID NO: 473 - DNA, 20 bp, Artificial Sequence
  Synthetic polynucleotide
gtacaccacctaaacccgaa

SEQ ID NO: 474 - DNA, 20 bp, Artificial Sequence
  Synthetic polynucleotide
ctatcccgttcgctctttaa

SEQ ID NO: 475 - DNA, 20 bp, Artificial Sequence
  Synthetic polynucleotide
atggcgctcttccctttaaa

SEQ ID NO: 476 - DNA, 20 bp, Artificial Sequence
  Synthetic polynucleotide
cctgccccccaactaattag

SEQ ID NO: 477 - DNA, 20 bp, Artificial Sequence
  Synthetic polynucleotide
gtttgtccaccctccaattg

SEQ ID NO: 478 - DNA, 20 bp, Artificial Sequence
  Synthetic polynucleotide
caagatcatcacttctattt

SEQ ID NO: 479 - DNA, 20 bp, Artificial Sequence
  Synthetic polynucleotide
ccgtcccacacactcttatt

SEQ ID NO: 480 - DNA, 20 bp, Artificial Sequence
  Synthetic polynucleotide
ttagtacccatcgccctata

SEQ ID NO: 481 - DNA, 20 bp, Artificial Sequence
  Synthetic polynucleotide
cgtgtccgcccatcttaaga

SEQ ID NO: 482 - DNA, 20 bp, Artificial Sequence
  Synthetic polynucleotide
gtcctcctgatacattcgtt

SEQ ID NO: 483 - DNA, 20 bp, Artificial Sequence
  Synthetic polynucleotide
atcgcgcctcctaactcgtg

SEQ ID NO: 484 - DNA, 20 bp, Artificial Sequence
  Synthetic polynucleotide
cctcacccgcttacctaggt

SEQ ID NO: 485 - DNA, 20 bp, Artificial Sequence
  Synthetic polynucleotide
cgcctccctcagtacccaag

SEQ ID NO: 486 - DNA, 20 bp, Artificial Sequence
  Synthetic polynucleotide
acactaccccaatcccaggg

SEQ ID NO: 487 - DNA, 20 bp, Artificial Sequence
  Synthetic polynucleotide
cactgacctcattcaaacgc

SEQ ID NO: 488 - DNA, 20 bp, Artificial Sequence
  Synthetic polynucleotide
aattatcccatctacaacgc

SEQ ID NO: 489 - DNA, 20 bp, Artificial Sequence
  Synthetic polynucleotide
tctgtactgctaaggtttaa

SEQ ID NO: 490 - DNA, 20 bp, Artificial Sequence
  Synthetic polynucleotide
tcaatcctctggtttaaaaa

SEQ ID NO: 491 - DNA, 20 bp, Artificial Sequence
  Synthetic polynucleotide
ctaagtcatgttggtaaata

SEQ ID NO: 492 - DNA, 20 bp, Artificial Sequence
  Synthetic polynucleotide
tcactacatactggaaatta

SEQ ID NO: 493 - DNA, 20 bp, Artificial Sequence
  Synthetic polynucleotide
tcaacacgttataggtaatt

SEQ ID NO: 494 - DNA, 20 bp, Artificial Sequence
  Synthetic polynucleotide
ttatagcaaatgcatctatc

SEQ ID NO: 495 - DNA, 20 bp, Artificial Sequence
  Synthetic polynucleotide
atgaatctctaaaaacaaac

SEQ ID NO: 496 - DNA, 20 bp, Artificial Sequence
  Synthetic polynucleotide
tacttacgtgttcggataat

SEQ ID NO: 497 - DNA, 20 bp, Artificial Sequence
  Synthetic polynucleotide
atattccgcaatggtacaaa

SEQ ID NO: 498 - DNA, 20 bp, Artificial Sequence
  Synthetic polynucleotide
catgtaccctggtattccac

SEQ ID NO: 499 - DNA, 20 bp, Artificial Sequence
  Synthetic polynucleotide
ggttaccacattaatacata

SEQ ID NO: 500 - DNA, 20 bp, Artificial Sequence
  Synthetic polynucleotide
cgtatccacaactcgtacct

SEQ ID NO: 501 - DNA, 20 bp, Artificial Sequence
  Synthetic polynucleotide
tatatgcaaaattacagcag

SEQ ID NO: 502 - DNA, 20 bp, Artificial Sequence
  Synthetic polynucleotide
tataatcaagtatccgtcgt

SEQ ID NO: 503 - DNA, 20 bp, Artificial Sequence
  Synthetic polynucleotide
cattcccaatatatcaccac

SEQ ID NO: 504 - DNA, 20 bp, Artificial Sequence
  Synthetic polynucleotide
ggtaatcttcttccatttcc

SEQ ID NO: 505 - DNA, 20 bp, Artificial Sequence
  Synthetic polynucleotide
cgtaaacaatttgatatatt

SEQ ID NO: 506 - DNA, 20 bp, Artificial Sequence
  Synthetic polynucleotide
accaatctgtgtggttaaaa

SEQ ID NO: 507 - DNA, 20 bp, Artificial Sequence
  Synthetic polynucleotide
aaaactcattgtgcgaattg

SEQ ID NO: 508 - DNA, 20 bp, Artificial Sequence
  Synthetic polynucleotide
aattgccccgagaggtttag

SEQ ID NO: 509 - DNA, 20 bp, Artificial Sequence
  Synthetic polynucleotide
tctttccaggtcccgtttgc

SEQ ID NO: 510 - DNA, 20 bp, Artificial Sequence
  Synthetic polynucleotide
taaaaacaactggataagtc

SEQ ID NO: 511 - DNA, 20 bp, Artificial Sequence
  Synthetic polynucleotide
gatcatcactcaagggctat

SEQ ID NO: 512 - DNA, 20 bp, Artificial Sequence
  Synthetic polynucleotide
tattatcttcacatggcatg

SEQ ID NO: 513 - DNA, 20 bp, Artificial Sequence
  Synthetic polynucleotide
aagtttcacaaaggttccaa

SEQ ID NO: 514 - DNA, 20 bp, Artificial Sequence
  Synthetic polynucleotide
taatatctagatcccggttc

SEQ ID NO: 515 - DNA, 20 bp, Artificial Sequence
  Synthetic polynucleotide
gtccctcgcccaggaagtga

SEQ ID NO: 516 - DNA, 20 bp, Artificial Sequence
  Synthetic polynucleotide
gtctctcacaatacgaacga

SEQ ID NO: 517 - DNA, 20 bp, Artificial Sequence
  Synthetic polynucleotide
ttcatacagagacagtcgtc

SEQ ID NO: 518 - DNA, 20 bp, Artificial Sequence
  Synthetic polynucleotide
aattgacttacacagacaac

SEQ ID NO: 519 - DNA, 20 bp, Artificial Sequence
  Synthetic polynucleotide
tgaattcctaaatcctttcc

SEQ ID NO: 520 - DNA, 20 bp, Artificial Sequence
  Synthetic polynucleotide
ctatcaccgttggcataaat

SEQ ID NO: 521 - DNA, 20 bp, Artificial Sequence
  Synthetic polynucleotide
agaatccccttggctttata

SEQ ID NO: 522 - DNA, 20 bp, Artificial Sequence
  Synthetic polynucleotide
gagagccgggtctggcaatc

SEQ ID NO: 523 - DNA, 20 bp, Artificial Sequence
  Synthetic polynucleotide
atatagctgtggtcttactt

SEQ ID NO: 524 - DNA, 20 bp, Artificial Sequence
  Synthetic polynucleotide
tgaatacgtttactatgtat

SEQ ID NO: 525 - DNA, 20 bp, Artificial Sequence
  Synthetic polynucleotide
aagtggccttcatctgtatc

SEQ ID NO: 526 - DNA, 20 bp, Artificial Sequence
  Synthetic polynucleotide
ctgcctccgtcatatcaatc

SEQ ID NO: 527 - DNA, 20 bp, Artificial Sequence
  Synthetic polynucleotide
agtagacctgattagcaatt

SEQ ID NO: 528 - DNA, 20 bp, Artificial Sequence
  Synthetic polynucleotide
aagtgactaaacagagcgag

SEQ ID NO: 529 - DNA, 20 bp, Artificial Sequence
  Synthetic polynucleotide
aactagcgctatttggaagg

SEQ ID NO: 530 - DNA, 20 bp, Artificial Sequence
  Synthetic polynucleotide
tatcaccctggcatagacat

SEQ ID NO: 531 - DNA, 20 bp, Artificial Sequence
  Synthetic polynucleotide
tagtaactcaacctcagcag

SEQ ID NO: 532 - DNA, 20 bp, Artificial Sequence
  Synthetic polynucleotide
acgtaactgacgagaaccga

SEQ ID NO: 533 - DNA, 20 bp, Artificial Sequence
  Synthetic polynucleotide
gtttgactttaaacagcagc

SEQ ID NO: 534 - DNA, 20 bp, Artificial Sequence
  Synthetic polynucleotide
gatcatcttggacctaaatt

SEQ ID NO: 535 - DNA, 20 bp, Artificial Sequence
  Synthetic polynucleotide
cctttgctcagacgtttctc

SEQ ID NO: 536 - DNA, 20 bp, Artificial Sequence
  Synthetic polynucleotide
aactttcttaggcgatttaa

SEQ ID NO: 537 - DNA, 20 bp, Artificial Sequence
  Synthetic polynucleotide
ccgcatcgatcactgaaact

SEQ ID NO: 538 - DNA, 20 bp, Artificial Sequence
  Synthetic polynucleotide
tgaaaccctatgcaaatatg

SEQ ID NO: 539 - DNA, 20 bp, Artificial Sequence
  Synthetic polynucleotide
tgaggtcttacggcacattt

SEQ ID NO: 540 - DNA, 20 bp, Artificial Sequence
  Synthetic polynucleotide
ggtccacaatcggtcttgat

SEQ ID NO: 541 - DNA, 20 bp, Artificial Sequence
  Synthetic polynucleotide
ccaacacgcaagcatggtta

SEQ ID NO: 542 - DNA, 20 bp, Artificial Sequence
  Synthetic polynucleotide
agagttcggttgaggcaata

SEQ ID NO: 543 - DNA, 20 bp, Artificial Sequence
  Synthetic polynucleotide
tgaccccccacatatcggat

SEQ ID NO: 544 - DNA, 20 bp, Artificial Sequence
  Synthetic polynucleotide
tcacaacctggatcaaggat

SEQ ID NO: 545 - DNA, 20 bp, Artificial Sequence
  Synthetic polynucleotide
cccataccctgttgacctga

SEQ ID NO: 546 - DNA, 20 bp, Artificial Sequence
  Synthetic polynucleotide
catcatcatatagtgacgac

SEQ ID NO: 547 - DNA, 20 bp, Artificial Sequence
  Synthetic polynucleotide
cttacacccccaatccgaga

SEQ ID NO: 548 - DNA, 20 bp, Artificial Sequence
  Synthetic polynucleotide
tcagcaccgataccgcgaag

SEQ ID NO: 549 - DNA, 20 bp, Artificial Sequence
  Synthetic polynucleotide
agatgtcgacgaggctttca

SEQ ID NO: 550 - DNA, 20 bp, Artificial Sequence
  Synthetic polynucleotide
tctagactcgaggaatttcg

SEQ ID NO: 551 - DNA, 20 bp, Artificial Sequence
  Synthetic polynucleotide
tccctcccctctgggcattt

SEQ ID NO: 552 - DNA, 20 bp, Artificial Sequence
  Synthetic polynucleotide
cgctccctgccggtaattac

SEQ ID NO: 553 - DNA, 20 bp, Artificial Sequence
  Synthetic polynucleotide
cgcacgccctttctgcatct

SEQ ID NO: 554 - DNA, 20 bp, Artificial Sequence
  Synthetic polynucleotide
gctcatccccactctgctct

SEQ ID NO: 555 - DNA, 20 bp, Artificial Sequence
  Synthetic polynucleotide
cattgtcccccaccagctag

SEQ ID NO: 556 - DNA, 20 bp, Artificial Sequence
  Synthetic polynucleotide
cctctcctagagccatgtca

SEQ ID NO: 557 - DNA, 20 bp, Artificial Sequence
  Synthetic polynucleotide
tttaagctcgggaaaagtct

SEQ ID NO: 558 - DNA, 20 bp, Artificial Sequence
  Synthetic polynucleotide
gtacaccattagtgagtgag

SEQ ID NO: 559 - DNA, 20 bp, Artificial Sequence
  Synthetic polynucleotide
ctttgtcatcgttccgacga

SEQ ID NO: 560 - DNA, 20 bp, Artificial Sequence
  Synthetic polynucleotide
tccggacaggaagaggcata

SEQ ID NO: 561 - DNA, 20 bp, Artificial Sequence
  Synthetic polynucleotide
cctagtccctaaatcaccac

SEQ ID NO: 562 - DNA, 20 bp, Artificial Sequence
  Synthetic polynucleotide
accagtcgacaatgaaccaa

SEQ ID NO: 563 - DNA, 20 bp, Artificial Sequence
  Synthetic polynucleotide
tcactcctacgctaaaacgc

SEQ ID NO: 564 - DNA, 20 bp, Artificial Sequence
  Synthetic polynucleotide
tatactcccttaccttatta

SEQ ID NO: 565 - DNA, 20 bp, Artificial Sequence
  Synthetic polynucleotide
tctaatctttaggtatttct

SEQ ID NO: 566 - DNA, 20 bp, Artificial Sequence
  Synthetic polynucleotide
aaacgacttgtacattaatt

SEQ ID NO: 567 - DNA, 20 bp, Artificial Sequence
  Synthetic polynucleotide
caagaacatagcagctttct

SEQ ID NO: 568 - DNA, 20 bp, Artificial Sequence
  Synthetic polynucleotide
aatctccaagattgtctttc

SEQ ID NO: 569 - DNA, 20 bp, Artificial Sequence
  Synthetic polynucleotide
tcgtacctctaattgattat

SEQ ID NO: 570 - DNA, 20 bp, Artificial Sequence
  Synthetic polynucleotide
gaaaatcactactgaaattc

SEQ ID NO: 571 - DNA, 20 bp, Artificial Sequence
  Synthetic polynucleotide
atatctcaattagactatag

SEQ ID NO: 572 - DNA, 20 bp, Artificial Sequence
  Synthetic polynucleotide
actttaccatcgtgtataaa

SEQ ID NO: 573 - DNA, 20 bp, Artificial Sequence
  Synthetic polynucleotide
agatatcatgtgactaacta

SEQ ID NO: 574 - DNA, 20 bp, Artificial Sequence
  Synthetic polynucleotide
gtatatcattcgatcaagat

SEQ ID NO: 575 - DNA, 20 bp, Artificial Sequence
  Synthetic polynucleotide
aaatcacctccttataccct

SEQ ID NO: 576 - DNA, 20 bp, Artificial Sequence
  Synthetic polynucleotide
atagtactagcacagaccag

SEQ ID NO: 577 - DNA, 20 bp, Artificial Sequence
  Synthetic polynucleotide
ctatgacaccgaaatacgaa

SEQ ID NO: 578 - DNA, 20 bp, Artificial Sequence
  Synthetic polynucleotide
atttgacaaggcaacatcat

SEQ ID NO: 579 - DNA, 20 bp, Artificial Sequence
  Synthetic polynucleotide
cggcctctatttagtttatt

SEQ ID NO: 580 - DNA, 20 bp, Artificial Sequence
  Synthetic polynucleotide
ccactgcaaccggcattatt

SEQ ID NO: 581 - DNA, 20 bp, Artificial Sequence
  Synthetic polynucleotide
actgtacggacggattaatt

SEQ ID NO: 582 - DNA, 20 bp, Artificial Sequence
  Synthetic polynucleotide
acgctacatttccctagtta

SEQ ID NO: 583 - DNA, 20 bp, Artificial Sequence
  Synthetic polynucleotide
accatgcaatggtcaaataa

SEQ ID NO: 584 - DNA, 20 bp, Artificial Sequence
  Synthetic polynucleotide
aaaaatcttggtcttagatt

SEQ ID NO: 585 - DNA, 20 bp, Artificial Sequence
  Synthetic polynucleotide
cgactgcaatacattgaaat

SEQ ID NO: 586 - DNA, 20 bp, Artificial Sequence
  Synthetic polynucleotide
ggagctcatagttcagctca

SEQ ID NO: 587 - DNA, 20 bp, Artificial Sequence
  Synthetic polynucleotide
tctaaacgctaaaggcatag

SEQ ID NO: 588 - DNA, 20 bp, Artificial Sequence
  Synthetic polynucleotide
acttggcccaaataaaggaa

SEQ ID NO: 589 - DNA, 20 bp, Artificial Sequence
  Synthetic polynucleotide
tataaactttacttgtgcgg

SEQ ID NO: 590 - DNA, 20 bp, Artificial Sequence
  Synthetic polynucleotide
atacgacatcacactagagt

SEQ ID NO: 591 - DNA, 20 bp, Artificial Sequence
  Synthetic polynucleotide
cgtgaactatgtgacaacag

SEQ ID NO: 592 - DNA, 20 bp, Artificial Sequence
  Synthetic polynucleotide
agatcacttaaggtcactgt

SEQ ID NO: 593 - DNA, 20 bp, Artificial Sequence
  Synthetic polynucleotide
tatatgcttagcagactggc

SEQ ID NO: 594 - DNA, 20 bp, Artificial Sequence
  Synthetic polynucleotide
gtccttctggtactgtttaa

SEQ ID NO: 595 - DNA, 20 bp, Artificial Sequence
  Synthetic polynucleotide
tatattctttacacctttca

SEQ ID NO: 596 - DNA, 20 bp, Artificial Sequence
  Synthetic polynucleotide
gttgtgcccctctttcttct

SEQ ID NO: 597 - DNA, 20 bp, Artificial Sequence
  Synthetic polynucleotide
cgactacctattggcctttg

SEQ ID NO: 598 - DNA, 20 bp, Artificial Sequence
  Synthetic polynucleotide
acatacctgcaagcttactt

SEQ ID NO: 599 - DNA, 20 bp, Artificial Sequence
  Synthetic polynucleotide
tccgatcgtacgtactttcg

SEQ ID NO: 600 - DNA, 20 bp, Artificial Sequence
  Synthetic polynucleotide
acattacaataatgctgact

SEQ ID NO: 601 - DNA, 20 bp, Artificial Sequence
  Synthetic polynucleotide
atgtctctctcgaggtctca

SEQ ID NO: 602 - DNA, 20 bp, Artificial Sequence
  Synthetic polynucleotide
gtgaagcaagagcggtaatc

SEQ ID NO: 603 - DNA, 20 bp, Artificial Sequence
  Synthetic polynucleotide
attagcctaccaactcgaat

SEQ ID NO: 604 - DNA, 20 bp, Artificial Sequence
  Synthetic polynucleotide
aaactgcagcatcatgatga

SEQ ID NO: 605 - DNA, 20 bp, Artificial Sequence
  Synthetic polynucleotide
agtatcctattctatcgtgt

SEQ ID NO: 606 - DNA, 20 bp, Artificial Sequence
  Synthetic polynucleotide
tgaacccgcagttataacgc

SEQ ID NO: 607 - DNA, 20 bp, Artificial Sequence
  Synthetic polynucleotide
taagaactacagttacccag

SEQ ID NO: 608 - DNA, 20 bp, Artificial Sequence
  Synthetic polynucleotide
acaccgcaataaagacagga

SEQ ID NO: 609 - DNA, 20 bp, Artificial Sequence
  Synthetic polynucleotide
acactcctcgtgcgatttag

SEQ ID NO: 610 - DNA, 20 bp, Artificial Sequence
  Synthetic polynucleotide
aattctcattcggctaaaat

SEQ ID NO: 611 - DNA, 20 bp, Artificial Sequence
  Synthetic polynucleotide
cctttacagactgtatttac

SEQ ID NO: 612 - DNA, 20 bp, Artificial Sequence
  Synthetic polynucleotide
tcgagcctttcatggtaacc

SEQ ID NO: 613 - DNA, 20 bp, Artificial Sequence
  Synthetic polynucleotide
tgaagcccccgatgtagtat

SEQ ID NO: 614 - DNA, 20 bp, Artificial Sequence
  Synthetic polynucleotide
cgccgacattagcgatattg

SEQ ID NO: 615 - DNA, 20 bp, Artificial Sequence
  Synthetic polynucleotide
ccctaacacgcttaagagct

SEQ ID NO: 616 - DNA, 20 bp, Artificial Sequence
  Synthetic polynucleotide
tacctgcgcttgcgactaac

SEQ ID NO: 617 - DNA, 20 bp, Artificial Sequence
  Synthetic polynucleotide
cagtaaccagtgcattacca

SEQ ID NO: 618 - DNA, 20 bp, Artificial Sequence
  Synthetic polynucleotide
ctcgcactttcctacctacc

SEQ ID NO: 619 - DNA, 20 bp, Artificial Sequence
  Synthetic polynucleotide
cccttcccatgtcgcacgga

SEQ ID NO: 620 - DNA, 20 bp, Artificial Sequence
  Synthetic polynucleotide
cgtacactctgatgattcgg

SEQ ID NO: 621 - DNA, 20 bp, Artificial Sequence
  Synthetic polynucleotide
aacctactactctgaccaga

SEQ ID NO: 622 - DNA, 20 bp, Artificial Sequence
  Synthetic polynucleotide
acacacccagcatcatcagc

SEQ ID NO: 623 - DNA, 20 bp, Artificial Sequence
  Synthetic polynucleotide
cgcctgctatgttccaacaa

SEQ ID NO: 624 - DNA, 20 bp, Artificial Sequence
  Synthetic polynucleotide
ctcaccccgcctcggtattt

SEQ ID NO: 625 - DNA, 20 bp, Artificial Sequence
  Synthetic polynucleotide
ctggcgcacgaggcggttct

SEQ ID NO: 626 - DNA, 20 bp, Artificial Sequence
  Synthetic polynucleotide
cccttccatcgccactttcg

SEQ ID NO: 627 - DNA, 20 bp, Artificial Sequence
  Synthetic polynucleotide
tcctcccgtgccactttcca

SEQ ID NO: 628 - DNA, 20 bp, Artificial Sequence
  Synthetic polynucleotide
cgccagctgttagtcattta

SEQ ID NO: 629 - DNA, 20 bp, Artificial Sequence
  Synthetic polynucleotide
gcgcaacggcggtttctaaa

SEQ ID NO: 630 - DNA, 20 bp, Artificial Sequence
  Synthetic polynucleotide
tcccaacactcaccgtccgt

SEQ ID NO: 631 - DNA, 20 bp, Artificial Sequence
  Synthetic polynucleotide
cttccactgttacgatcgat

SEQ ID NO: 632 - DNA, 20 bp, Artificial Sequence
  Synthetic polynucleotide
cgccgccctccatccatgtg

SEQ ID NO: 633 - DNA, 20 bp, Artificial Sequence
  Synthetic polynucleotide
agcaacctacctacgccgca

SEQ ID NO: 634 - DNA, 20 bp, Artificial Sequence
  Synthetic polynucleotide
cacatgctccccgactaagt

SEQ ID NO: 635 - DNA, 20 bp, Artificial Sequence
  Synthetic polynucleotide
ccctctccagctgcccctgc

SEQ ID NO: 636 - DNA, 20 bp, Artificial Sequence
  Synthetic polynucleotide
tgtcgactcttctaaaccga

SEQ ID NO: 637 - DNA, 20 bp, Artificial Sequence
  Synthetic polynucleotide
acgcaccgtaagaacaaaga

SEQ ID NO: 638 - DNA, 20 bp, Artificial Sequence
  Synthetic polynucleotide
aacgcccctttatacatcgg

SEQ ID NO: 639 - DNA, 20 bp, Artificial Sequence
  Synthetic polynucleotide
taaataccgcgatctttatt

SEQ ID NO: 640 - DNA, 20 bp, Artificial Sequence
  Synthetic polynucleotide
gaacatcgcctgaaataatg

SEQ ID NO: 641 - DNA, 20 bp, Artificial Sequence
  Synthetic polynucleotide
tctatcctacttgatattat

SEQ ID NO: 642 - DNA, 20 bp, Artificial Sequence
  Synthetic polynucleotide
catcaacattgtcttcttat

SEQ ID NO: 643 - DNA, 20 bp, Artificial Sequence
  Synthetic polynucleotide
tttatgctcatgcaataata

SEQ ID NO: 644 - DNA, 20 bp, Artificial Sequence
  Synthetic polynucleotide
gcatgtcagtaaacgaattt

SEQ ID NO: 645 - DNA, 20 bp, Artificial Sequence
  Synthetic polynucleotide
gactatcaatatggtggaat

SEQ ID NO: 646 - DNA, 20 bp, Artificial Sequence
  Synthetic polynucleotide
agatgtccagttaacaaata

SEQ ID NO: 647 - DNA, 20 bp, Artificial Sequence
  Synthetic polynucleotide
tataatctagcaaatttcaa

SEQ ID NO: 648 - DNA, 20 bp, Artificial Sequence
  Synthetic polynucleotide
ttgactcggattaccagaca

SEQ ID NO: 649 - DNA, 20 bp, Artificial Sequence
  Synthetic polynucleotide
tttatcctgtaatgcaagta

SEQ ID NO: 650 - DNA, 20 bp, Artificial Sequence
  Synthetic polynucleotide
aattatccatgcataaaagc

SEQ ID NO: 651 - DNA, 20 bp, Artificial Sequence
  Synthetic polynucleotide
taacatcgactatacaagaa

SEQ ID NO: 652 - DNA, 20 bp, Artificial Sequence
  Synthetic polynucleotide
aatgcccagtgaaagaccag

SEQ ID NO: 653 - DNA, 20 bp, Artificial Sequence
  Synthetic polynucleotide
gtaatgctatagtaaaacgt

SEQ ID NO: 654 - DNA, 20 bp, Artificial Sequence
  Synthetic polynucleotide
tacatccgtaaaggttattt

SEQ ID NO: 655 - DNA, 20 bp, Artificial Sequence
  Synthetic polynucleotide
agaattctgcgtccatatta

SEQ ID NO: 656 - DNA, 20 bp, Artificial Sequence
  Synthetic polynucleotide
attattcaatgactttaact

SEQ ID NO: 657 - DNA, 20 bp, Artificial Sequence
  Synthetic polynucleotide
catactcactagttgtttag

SEQ ID NO: 658 - DNA, 20 bp, Artificial Sequence
  Synthetic polynucleotide
agatgccccattgcacaaat

SEQ ID NO: 659 - DNA, 20 bp, Artificial Sequence
  Synthetic polynucleotide
tacatccgaatcgcataatg

SEQ ID NO: 660 - DNA, 20 bp, Artificial Sequence
  Synthetic polynucleotide
aatagccctgtcaggctata

SEQ ID NO: 661 - DNA, 20 bp, Artificial Sequence
  Synthetic polynucleotide
aaagtccaacgttagatatg

SEQ ID NO: 662 - DNA, 20 bp, Artificial Sequence
  Synthetic polynucleotide
caacttcccgaaatgcggtt

SEQ ID NO: 663 - DNA, 20 bp, Artificial Sequence
  Synthetic polynucleotide
tcaaatccgtcttacaagaa

SEQ ID NO: 664 - DNA, 20 bp, Artificial Sequence
  Synthetic polynucleotide
gtcagtcaggaatccgaaac

SEQ ID NO: 665 - DNA, 20 bp, Artificial Sequence
  Synthetic polynucleotide
gaacccctcgatgtttgcta

SEQ ID NO: 666 - DNA, 20 bp, Artificial Sequence
  Synthetic polynucleotide
ataagtcaatctagctgtga

SEQ ID NO: 667 - DNA, 20 bp, Artificial Sequence
  Synthetic polynucleotide
ttacttcctgatcacaagac

SEQ ID NO: 668 - DNA, 20 bp, Artificial Sequence
  Synthetic polynucleotide
tatcctccgagaacttgggt

SEQ ID NO: 669 - DNA, 20 bp, Artificial Sequence
  Synthetic polynucleotide
atatatcgtttactatttac

SEQ ID NO: 670 - DNA, 20 bp, Artificial Sequence
  Synthetic polynucleotide
gacactcgttggctttaaat

SEQ ID NO: 671 - DNA, 20 bp, Artificial Sequence
  Synthetic polynucleotide
ctgggactgaagggatttag

SEQ ID NO: 672 - DNA, 20 bp, Artificial Sequence
  Synthetic polynucleotide
ctgacgcatactgggtaata

SEQ ID NO: 673 - DNA, 20 bp, Artificial Sequence
  Synthetic polynucleotide
tcctttcggtttagtctaac

SEQ ID NO: 674 - DNA, 20 bp, Artificial Sequence
  Synthetic polynucleotide
ctttctcgctttcattctca

SEQ ID NO: 675 - DNA, 20 bp, Artificial Sequence
  Synthetic polynucleotide
tacgttcccgattactatac

SEQ ID NO: 676 - DNA, 20 bp, Artificial Sequence
  Synthetic polynucleotide
aagaatcaacacttacaaac

SEQ ID NO: 677 - DNA, 20 bp, Artificial Sequence
  Synthetic polynucleotide
gcttaacagcggagtactca

SEQ ID NO: 678 - DNA, 20 bp, Artificial Sequence
  Synthetic polynucleotide
acaggaccgttgtagttagc

SEQ ID NO: 679 - DNA, 20 bp, Artificial Sequence
  Synthetic polynucleotide
cattaacgatcaaccatagc

SEQ ID NO: 680 - DNA, 20 bp, Artificial Sequence
  Synthetic polynucleotide
catccgctcagacaggtgaa

SEQ ID NO: 681 - DNA, 20 bp, Artificial Sequence
  Synthetic polynucleotide
aacgcacaacagatttcaga

SEQ ID NO: 682 - DNA, 20 bp, Artificial Sequence
  Synthetic polynucleotide
acgcaccaagtgatgattgt

SEQ ID NO: 683 - DNA, 20 bp, Artificial Sequence
  Synthetic polynucleotide
gagactccacacgtaaacgg

SEQ ID NO: 684 - DNA, 20 bp, Artificial Sequence
  Synthetic polynucleotide
accatgcccgatggaattaa

SEQ ID NO: 685 - DNA, 20 bp, Artificial Sequence
  Synthetic polynucleotide
atcatgctcggccctattat

SEQ ID NO: 686 - DNA, 20 bp, Artificial Sequence
  Synthetic polynucleotide
gcatacctatccgtttatta

SEQ ID NO: 687 - DNA, 20 bp, Artificial Sequence
  Synthetic polynucleotide
gtaaccccaatcgtttcttt

SEQ ID NO: 688 - DNA, 20 bp, Artificial Sequence
  Synthetic polynucleotide
caggtgcgcgccgtcgatta

SEQ ID NO: 689 - DNA, 20 bp, Artificial Sequence
  Synthetic polynucleotide
agcagacgttcggggaaatt

SEQ ID NO: 690 - DNA, 20 bp, Artificial Sequence
  Synthetic polynucleotide
gttatacacggcaatttacc

SEQ ID NO: 691 - DNA, 20 bp, Artificial Sequence
  Synthetic polynucleotide
cggggccaaccggtgaaaac

SEQ ID NO: 692 - DNA, 20 bp, Artificial Sequence
  Synthetic polynucleotide
agcacgcaaaaaaggttctc

SEQ ID NO: 693 - DNA, 20 bp, Artificial Sequence
  Synthetic polynucleotide
tgcattctgagtcaggaccc

SEQ ID NO: 694 - DNA, 20 bp, Artificial Sequence
  Synthetic polynucleotide
tacccgccataacgccgcat

SEQ ID NO: 695 - DNA, 20 bp, Artificial Sequence
  Synthetic polynucleotide
gagagtccagtatgttagga

SEQ ID NO: 696 - DNA, 20 bp, Artificial Sequence
  Synthetic polynucleotide
cataccctaacgatcacacg

SEQ ID NO: 697 - DNA, 20 bp, Artificial Sequence
  Synthetic polynucleotide
ttaaggcgacgttatatcgc

SEQ ID NO: 698 - DNA, 20 bp, Artificial Sequence
  Synthetic polynucleotide
gtacttcaaattgacactga

SEQ ID NO: 699 - DNA, 20 bp, Artificial Sequence
  Synthetic polynucleotide
ggttggctttcctacttcta

SEQ ID NO: 700 - DNA, 20 bp, Artificial Sequence
  Synthetic polynucleotide
ggcatccgtgttctatttct

SEQ ID NO: 701 - DNA, 20 bp, Artificial Sequence
  Synthetic polynucleotide
ctttcgcccttcgtctttca

SEQ ID NO: 702 - DNA, 20 bp, Artificial Sequence
  Synthetic polynucleotide
tgccctcgggacgcgtctaa

SEQ ID NO: 703 - DNA, 20 bp, Artificial Sequence
  Synthetic polynucleotide
tcgtctctcatacggcaatt

SEQ ID NO: 704 - DNA, 20 bp, Artificial Sequence
  Synthetic polynucleotide
tccgtccgctgtgtcataca

SEQ ID NO: 705 - DNA, 20 bp, Artificial Sequence
  Synthetic polynucleotide
ggccgtcgcattggtccaaa

SEQ ID NO: 706 - DNA, 20 bp, Artificial Sequence
  Synthetic polynucleotide
gctgcccctggagttcacat

SEQ ID NO: 707 - DNA, 20 bp, Artificial Sequence
  Synthetic polynucleotide
agcacgcgacgctgcaatac

SEQ ID NO: 708 - DNA, 20 bp, Artificial Sequence
  Synthetic polynucleotide
tgcgcgcttcctacgataga

SEQ ID NO: 709 - DNA, 20 bp, Artificial Sequence
  Synthetic polynucleotide
gcactacagctcttcacgca

SEQ ID NO: 710 - DNA, 20 bp, Artificial Sequence
  Synthetic polynucleotide
cctccacttgccactacaac

SEQ ID NO: 711 - DNA, 20 bp, Artificial Sequence
  Synthetic polynucleotide
atacccccgaactacaccgc

SEQ ID NO: 712 - DNA, 20 bp, Artificial Sequence
  Synthetic polynucleotide
cttgagcaatcacgtacgtg

SEQ ID NO: 713 - DNA, 20 bp, Artificial Sequence
  Synthetic polynucleotide
agtagcccgtgactcaacgt

SEQ ID NO: 714 - DNA, 20 bp, Artificial Sequence
  Synthetic polynucleotide
aagatacattaaactttatt

SEQ ID NO: 715 - DNA, 20 bp, Artificial Sequence
  Synthetic polynucleotide
tattatctgtaagattaaat

SEQ ID NO: 716 - DNA, 20 bp, Artificial Sequence
  Synthetic polynucleotide
gattcgcatatctaatttaa

SEQ ID NO: 717 - DNA, 20 bp, Artificial Sequence
  Synthetic polynucleotide
aatgtaccggagctaatttc

SEQ ID NO: 718 - DNA, 20 bp, Artificial Sequence
  Synthetic polynucleotide
tatcctcacttcttgctgtt

SEQ ID NO: 719 - DNA, 20 bp, Artificial Sequence
  Synthetic polynucleotide
taaacgcttcacggttatag

SEQ ID NO: 720 - DNA, 20 bp, Artificial Sequence
  Synthetic polynucleotide
ttgattccagggaaattacg

SEQ ID NO: 721 - DNA, 20 bp, Artificial Sequence
  Synthetic polynucleotide
ttagagcattatccaaagaa

SEQ ID NO: 722 - DNA, 20 bp, Artificial Sequence
  Synthetic polynucleotide
tctaatcataacataatata

SEQ ID NO: 723 - DNA, 20 bp, Artificial Sequence
  Synthetic polynucleotide
gtattacgtcaagtatatgc

SEQ ID NO: 724 - DNA, 20 bp, Artificial Sequence
  Synthetic polynucleotide
aataacctggttagaaacac

SEQ ID NO: 725 - DNA, 20 bp, Artificial Sequence
  Synthetic polynucleotide
gttattcatatatagaggaa

SEQ ID NO: 726 - DNA, 20 bp, Artificial Sequence
  Synthetic polynucleotide
gaatgtccaataaattgtga

SEQ ID NO: 727 - DNA, 20 bp, Artificial Sequence
  Synthetic polynucleotide
aaacttcgagatttaactgt

SEQ ID NO: 728 - DNA, 20 bp, Artificial Sequence
  Synthetic polynucleotide
tatgaacaacagaagattgt

SEQ ID NO: 729 - DNA, 20 bp, Artificial Sequence
  Synthetic polynucleotide
caaactcagctgcttaaatt

SEQ ID NO: 730 - DNA, 20 bp, Artificial Sequence
  Synthetic polynucleotide
aatgtactcttgctgaattt

SEQ ID NO: 731 - DNA, 20 bp, Artificial Sequence
  Synthetic polynucleotide
gctctacttctatattattc

SEQ ID NO: 732 - DNA, 20 bp, Artificial Sequence
  Synthetic polynucleotide
tatgcgctgacctttaatct

SEQ ID NO: 733 - DNA, 20 bp, Artificial Sequence
  Synthetic polynucleotide
atcggtcgatttatcgttct

SEQ ID NO: 734 - DNA, 20 bp, Artificial Sequence
  Synthetic polynucleotide
aacaggccgtacggaaattt

SEQ ID NO: 735 - DNA, 20 bp, Artificial Sequence
  Synthetic polynucleotide
ctactacaaggttctcaatc

SEQ ID NO: 736 - DNA, 20 bp, Artificial Sequence
  Synthetic polynucleotide
taaggacccaaacgaataca

SEQ ID NO: 737 - DNA, 20 bp, Artificial Sequence
  Synthetic polynucleotide
tctcatcaggggaatgctta

SEQ ID NO: 738 - DNA, 20 bp, Artificial Sequence
  Synthetic polynucleotide
atatttcctatctctctcga

SEQ ID NO: 739 - DNA, 20 bp, Artificial Sequence
  Synthetic polynucleotide
agtataccacatcccgtgtt

SEQ ID NO: 740 - DNA, 20 bp, Artificial Sequence
  Synthetic polynucleotide
catgtactaattctagcatc

SEQ ID NO: 741 - DNA, 20 bp, Artificial Sequence
  Synthetic polynucleotide
acctgccggatgatgacatt

SEQ ID NO: 742 - DNA, 20 bp, Artificial Sequence
  Synthetic polynucleotide
gtatggcttgataatcacgc

SEQ ID NO: 743 - DNA, 20 bp, Artificial Sequence
  Synthetic polynucleotide
cgataacggtatagaactgc

SEQ ID NO: 744 - DNA, 20 bp, Artificial Sequence
  Synthetic polynucleotide
aattggcagtcctttaaatt

SEQ ID NO: 745 - DNA, 20 bp, Artificial Sequence
  Synthetic polynucleotide
tttgttctacctagttaata

SEQ ID NO: 746 - DNA, 20 bp, Artificial Sequence
  Synthetic polynucleotide
cgacagctgcattaataatt

SEQ ID NO: 747 - DNA, 20 bp, Artificial Sequence
  Synthetic polynucleotide
attctccaactacccaaaac

SEQ ID NO: 748 - DNA, 20 bp, Artificial Sequence
  Synthetic polynucleotide
gtacagcgactaataattat

SEQ ID NO: 749 - DNA, 20 bp, Artificial Sequence
  Synthetic polynucleotide
tacctcctcatcctgatctt

SEQ ID NO: 750 - DNA, 20 bp, Artificial Sequence
  Synthetic polynucleotide
tccgctcgtattgaacgtac

SEQ ID NO: 751 - DNA, 20 bp, Artificial Sequence
  Synthetic polynucleotide
cagcaccctaggtcacaatc

SEQ ID NO: 752 - DNA, 20 bp, Artificial Sequence
  Synthetic polynucleotide
catccacttcgtaaacatac

SEQ ID NO: 753 - DNA, 20 bp, Artificial Sequence
  Synthetic polynucleotide
tcggtacgtcactatctcaa

SEQ ID NO: 754 - DNA, 20 bp, Artificial Sequence
  Synthetic polynucleotide
agcggccactcccgagtata

SEQ ID NO: 755 - DNA, 20 bp, Artificial Sequence
  Synthetic polynucleotide
gaacatctacggacaaaccg

SEQ ID NO: 756 - DNA, 20 bp, Artificial Sequence
  Synthetic polynucleotide
tggcttcatgatttctccgc

SEQ ID NO: 757 - DNA, 20 bp, Artificial Sequence
  Synthetic polynucleotide
cttgggcacataattaccga

SEQ ID NO: 758 - DNA, 20 bp, Artificial Sequence
  Synthetic polynucleotide
aaagcacggataaccacggt

SEQ ID NO: 759 - DNA, 20 bp, Artificial Sequence
  Synthetic polynucleotide
gctttccaaaaggctttatc

SEQ ID NO: 760 - DNA, 20 bp, Artificial Sequence
  Synthetic polynucleotide
caatggcgcggcccttattt

SEQ ID NO: 761 - DNA, 20 bp, Artificial Sequence
  Synthetic polynucleotide
aaccctctggttatgtattt

SEQ ID NO: 762 - DNA, 20 bp, Artificial Sequence
  Synthetic polynucleotide
tgagaacgcggtctataact

SEQ ID NO: 763 - DNA, 20 bp, Artificial Sequence
  Synthetic polynucleotide
cccccccttgtctcctgatt

SEQ ID NO: 764 - DNA, 20 bp, Artificial Sequence
  Synthetic polynucleotide
accgtgctgtggtcacataa

SEQ ID NO: 765 - DNA, 20 bp, Artificial Sequence
  Synthetic polynucleotide
ataaaacgaattgatagtta

SEQ ID NO: 766 - DNA, 20 bp, Artificial Sequence
  Synthetic polynucleotide
tccccacaactaagtcaata

SEQ ID NO: 767 - DNA, 20 bp, Artificial Sequence
  Synthetic polynucleotide
atttagcacgaaagtttgcc

SEQ ID NO: 768 - DNA, 20 bp, Artificial Sequence
  Synthetic polynucleotide
aacatgccatatcgtcgcta

SEQ ID NO: 769 - DNA, 20 bp, Artificial Sequence
  Synthetic polynucleotide
gcactactttgcgacaacct

SEQ ID NO: 770 - DNA, 20 bp, Artificial Sequence
  Synthetic polynucleotide
agtccgcattatacttgatg

SEQ ID NO: 771 - DNA, 20 bp, Artificial Sequence
  Synthetic polynucleotide
cacccacagcttattgacgg

SEQ ID NO: 772 - DNA, 20 bp, Artificial Sequence
  Synthetic polynucleotide
atgcagcgagcattcttggg

SEQ ID NO: 773 - DNA, 20 bp, Artificial Sequence
  Synthetic polynucleotide
tcttaaccttactcaagaga

SEQ ID NO: 774 - DNA, 20 bp, Artificial Sequence
  Synthetic polynucleotide
aacgtgcaacccccctttct

SEQ ID NO: 775 - DNA, 20 bp, Artificial Sequence
  Synthetic polynucleotide
acctctcacccgtcttgttt

SEQ ID NO: 776 - DNA, 20 bp, Artificial Sequence
  Synthetic polynucleotide
ccccctcgtcctaagatttc

SEQ ID NO: 777 - DNA, 20 bp, Artificial Sequence
  Synthetic polynucleotide
tgcgagccttcgtatcctat

SEQ ID NO: 778 - DNA, 20 bp, Artificial Sequence
  Synthetic polynucleotide
cgggctcattgggaacttcc

SEQ ID NO: 779 - DNA, 20 bp, Artificial Sequence
  Synthetic polynucleotide
ccgcgccgagccatccatct

SEQ ID NO: 780 - DNA, 20 bp, Artificial Sequence
  Synthetic polynucleotide
tcacatcaatacattgctct

SEQ ID NO: 781 - DNA, 20 bp, Artificial Sequence
  Synthetic polynucleotide
tcgacgcctcactctttgtc

SEQ ID NO: 782 - DNA, 20 bp, Artificial Sequence
  Synthetic polynucleotide
cagcgccggtccaagtctga

SEQ ID NO: 783 - DNA, 20 bp, Artificial Sequence
  Synthetic polynucleotide
aacgtccagcatatcccgtc

SEQ ID NO: 784 - DNA, 20 bp, Artificial Sequence
  Synthetic polynucleotide
atgcaccagatgaattcatg

SEQ ID NO: 785 - DNA, 20 bp, Artificial Sequence
  Synthetic polynucleotide
aaccaacacagcacatgcgt

SEQ ID NO: 786 - DNA, 20 bp, Artificial Sequence
  Synthetic polynucleotide
aaatgccactaccacacagt

SEQ ID NO: 787 - DNA, 20 bp, Artificial Sequence
  Synthetic polynucleotide
ccgttccccacgtacacagc

SEQ ID NO: 788 - DNA, 20 bp, Artificial Sequence
  Synthetic polynucleotide
attaccctcattactaccgc

SEQ ID NO: 789 - DNA, 20 bp, Artificial Sequence
  Synthetic polynucleotide
agtattcattcattctttaa

SEQ ID NO: 790 - DNA, 20 bp, Artificial Sequence
  Synthetic polynucleotide
gccatccttcttatattaac

SEQ ID NO: 791 - DNA, 20 bp, Artificial Sequence
  Synthetic polynucleotide
aaacttctaccgagtaaatt

SEQ ID NO: 792 - DNA, 20 bp, Artificial Sequence
  Synthetic polynucleotide
tctatgcatagaataaaact

SEQ ID NO: 793 - DNA, 20 bp, Artificial Sequence
  Synthetic polynucleotide
ggtaacctatgatataatac

SEQ ID NO: 794 - DNA, 20 bp, Artificial Sequence
  Synthetic polynucleotide
gttgatctaatactaaaatc

SEQ ID NO: 795 - DNA, 20 bp, Artificial Sequence
  Synthetic polynucleotide
ctatgccattaaaaaaattc

SEQ ID NO: 796 - DNA, 20 bp, Artificial Sequence
  Synthetic polynucleotide
acagaacgtgtttacgatct

SEQ ID NO: 797 - DNA, 20 bp, Artificial Sequence
  Synthetic polynucleotide
attaagcattattgctgttc

SEQ ID NO: 798 - DNA, 20 bp, Artificial Sequence
  Synthetic polynucleotide
gttatgcacaataaaatagt

SEQ ID NO: 799 - DNA, 20 bp, Artificial Sequence
  Synthetic polynucleotide
aggtatctatgtatataagg

SEQ ID NO: 800 - DNA, 20 bp, Artificial Sequence
  Synthetic polynucleotide
gctcatccgtaatttaaagg

SEQ ID NO: 801 - DNA, 20 bp, Artificial Sequence
  Synthetic polynucleotide
atcacactacagtataacga

SEQ ID NO: 802 - DNA, 20 bp, Artificial Sequence
  Synthetic polynucleotide
tagaatctaagtattcacac

SEQ ID NO: 803 - DNA, 20 bp, Artificial Sequence
  Synthetic polynucleotide
gaaatccagtaagataacgg

SEQ ID NO: 804 - DNA, 20 bp, Artificial Sequence
  Synthetic polynucleotide
aatgttcatgcttcatattt

SEQ ID NO: 805 - DNA, 20 bp, Artificial Sequence
  Synthetic polynucleotide
acagcgcaagccactaattt

SEQ ID NO: 806 - DNA, 20 bp, Artificial Sequence
  Synthetic polynucleotide
attgaccggttctctaattt

SEQ ID NO: 807 - DNA, 20 bp, Artificial Sequence
  Synthetic polynucleotide
acctgtcgcagacctataaa

SEQ ID NO: 808 - DNA, 20 bp, Artificial Sequence
  Synthetic polynucleotide
tttctcccaaatacttataa

SEQ ID NO: 809 - DNA, 20 bp, Artificial Sequence
  Synthetic polynucleotide
tataggcaagatccctttac

SEQ ID NO: 810 - DNA, 20 bp, Artificial Sequence
  Synthetic polynucleotide
ttggtcctagcttacaatcg

SEQ ID NO: 811 - DNA, 20 bp, Artificial Sequence
  Synthetic polynucleotide
aagaaaccagaccctttatg

SEQ ID NO: 812 - DNA, 20 bp, Artificial Sequence
  Synthetic polynucleotide
aaccaactaaatacttcata

SEQ ID NO: 813 - DNA, 20 bp, Artificial Sequence
  Synthetic polynucleotide
cagtctcgagagaaccaata

SEQ ID NO: 814 - DNA, 20 bp, Artificial Sequence
  Synthetic polynucleotide
atagaacccctgatgctaat

SEQ ID NO: 815 - DNA, 20 bp, Artificial Sequence
  Synthetic polynucleotide
gtctgccacataaatacact

SEQ ID NO: 816 - DNA, 20 bp, Artificial Sequence
  Synthetic polynucleotide
tggatccattaattctccgt

SEQ ID NO: 817 - DNA, 20 bp, Artificial Sequence
  Synthetic polynucleotide
aaaccacaagtgaccaactt

SEQ ID NO: 818 - DNA, 20 bp, Artificial Sequence
  Synthetic polynucleotide
aacagccaaatttacacata

SEQ ID NO: 819 - DNA, 20 bp, Artificial Sequence
  Synthetic polynucleotide
ttaaggcacttgcctaaatt

SEQ ID NO: 820 - DNA, 20 bp, Artificial Sequence
  Synthetic polynucleotide
ggaagacatcttaataattg

SEQ ID NO: 821 - DNA, 20 bp, Artificial Sequence
  Synthetic polynucleotide
tgtgcccggtttcgtatatt

SEQ ID NO: 822 - DNA, 20 bp, Artificial Sequence
  Synthetic polynucleotide
tttgaccagctcgcttaatg

SEQ ID NO: 823 - DNA, 20 bp, Artificial Sequence
  Synthetic polynucleotide
ggtgtacgacgaaaatttag

SEQ ID NO: 824 - DNA, 20 bp, Artificial Sequence
  Synthetic polynucleotide
ggtaacctcaaatctatttg

SEQ ID NO: 825 - DNA, 20 bp, Artificial Sequence
  Synthetic polynucleotide
gcattcctatttagaagcaa

SEQ ID NO: 826 - DNA, 20 bp, Artificial Sequence
  Synthetic polynucleotide
taggtgcctgaactatagtt

SEQ ID NO: 827 - DNA, 20 bp, Artificial Sequence
  Synthetic polynucleotide
ttctctcatcccgcttggta

SEQ ID NO: 828 - DNA, 20 bp, Artificial Sequence
  Synthetic polynucleotide
gctgaccgattgtatataga

SEQ ID NO: 829 - DNA, 20 bp, Artificial Sequence
  Synthetic polynucleotide
taaatcctcagaaatatggc

SEQ ID NO: 830 - DNA, 20 bp, Artificial Sequence
  Synthetic polynucleotide
actaacctcctaaacgacag

SEQ ID NO: 831 - DNA, 20 bp, Artificial Sequence
  Synthetic polynucleotide
ttaagtctacaagcacacgg

SEQ ID NO: 832 - DNA, 20 bp, Artificial Sequence
  Synthetic polynucleotide
ctgcgacatgtgtatgtcaa

SEQ ID NO: 833 - DNA, 20 bp, Artificial Sequence
  Synthetic polynucleotide
gtatagctatcttgctacgg

SEQ ID NO: 834 - DNA, 20 bp, Artificial Sequence
  Synthetic polynucleotide
ccgcttcgatctgatattaa

SEQ ID NO: 835 - DNA, 20 bp, Artificial Sequence
  Synthetic polynucleotide
ccaagcctgttatctattac

SEQ ID NO: 836 - DNA, 20 bp, Artificial Sequence
  Synthetic polynucleotide
ttctacctttcagctaattg

SEQ ID NO: 837 - DNA, 20 bp, Artificial Sequence
  Synthetic polynucleotide
aggccactcaagacaatttg

SEQ ID NO: 838 - DNA, 20 bp, Artificial Sequence
  Synthetic polynucleotide
ttcgaccgttgcacacaaaa

SEQ ID NO: 839 - DNA, 20 bp, Artificial Sequence
  Synthetic polynucleotide
aaacgacccgcctcatttac

SEQ ID NO: 840 - DNA, 20 bp, Artificial Sequence
  Synthetic polynucleotide
tagaatcccgtcctttagca

SEQ ID NO: 841 - DNA, 20 bp, Artificial Sequence
  Synthetic polynucleotide
ccgcggccctttccccctta

SEQ ID NO: 842 - DNA, 20 bp, Artificial Sequence
  Synthetic polynucleotide
cccatcccgtgatgatccta

SEQ ID NO: 843 - DNA, 20 bp, Artificial Sequence
  Synthetic polynucleotide
tccgttcgagaaataccctc

SEQ ID NO: 844 - DNA, 20 bp, Artificial Sequence
  Synthetic polynucleotide
accattcactaaacctcgta

SEQ ID NO: 845 - DNA, 20 bp, Artificial Sequence
  Synthetic polynucleotide
cagtaccctgaaaaatctgg

SEQ ID NO: 846 - DNA, 20 bp, Artificial Sequence
  Synthetic polynucleotide
ccggcgcatcacataactga

SEQ ID NO: 847 - DNA, 20 bp, Artificial Sequence
  Synthetic polynucleotide
aacctccctgtgataccggc

SEQ ID NO: 848 - DNA, 20 bp, Artificial Sequence
  Synthetic polynucleotide
aacgccctaccgtacagaga

SEQ ID NO: 849 - DNA, 20 bp, Artificial Sequence
  Synthetic polynucleotide
gcccatccgctccctcgttt

SEQ ID NO: 850 - DNA, 20 bp, Artificial Sequence
  Synthetic polynucleotide
ccctaccgcaccgactttca

SEQ ID NO: 851 - DNA, 20 bp, Artificial Sequence
  Synthetic polynucleotide
tctctccacccgcagtcttt

SEQ ID NO: 852 - DNA, 20 bp, Artificial Sequence
  Synthetic polynucleotide
gacagtcaccgcaaaaatag

SEQ ID NO: 853 - DNA, 20 bp, Artificial Sequence
  Synthetic polynucleotide
acagccctcgaagtgaattt

SEQ ID NO: 854 - DNA, 20 bp, Artificial Sequence
  Synthetic polynucleotide
gaccgcctcaagcctttaaa

SEQ ID NO: 855 - DNA, 20 bp, Artificial Sequence
  Synthetic polynucleotide
ctcagccgagtagtcactaa

SEQ ID NO: 856 - DNA, 20 bp, Artificial Sequence
  Synthetic polynucleotide
gcccgtcccatccgccagtg

SEQ ID NO: 857 - DNA, 20 bp, Artificial Sequence
  Synthetic polynucleotide
ctgatgctttgaaattaccg

SEQ ID NO: 858 - DNA, 20 bp, Artificial Sequence
  Synthetic polynucleotide
ggcgagctcgagacgagaaa

SEQ ID NO: 859 - DNA, 20 bp, Artificial Sequence
  Synthetic polynucleotide
aactacccacgaccccccta

SEQ ID NO: 860 - DNA, 20 bp, Artificial Sequence
  Synthetic polynucleotide
cccagacctaacacttaggc

SEQ ID NO: 861 - DNA, 20 bp, Artificial Sequence
  Synthetic polynucleotide
cgtccacagtagaaacaggg

SEQ ID NO: 862 - DNA, 20 bp, Artificial Sequence
  Synthetic polynucleotide
gtcctgcgatacaccactgg

SEQ ID NO: 863 - DNA, 20 bp, Artificial Sequence
  Synthetic polynucleotide
gccctgctcagaattacggt

SEQ ID NO: 864 - DNA, 20 bp, Artificial Sequence
  Synthetic polynucleotide
atagctctatttgtctttct

SEQ ID NO: 865 - DNA, 20 bp, Artificial Sequence
  Synthetic polynucleotide
ttaaatctattacttagtta

SEQ ID NO: 866 - DNA, 20 bp, Artificial Sequence
  Synthetic polynucleotide
tttatactttaggcattaaa

SEQ ID NO: 867 - DNA, 20 bp, Artificial Sequence
  Synthetic polynucleotide
cttagacgtgtggacattac

SEQ ID NO: 868 - DNA, 20 bp, Artificial Sequence
  Synthetic polynucleotide
atttagccgtactttagttt

SEQ ID NO: 869 - DNA, 20 bp, Artificial Sequence
  Synthetic polynucleotide
tctctacacgaaattggttt

SEQ ID NO: 870 - DNA, 20 bp, Artificial Sequence
  Synthetic polynucleotide
tggtgtcaatgaaatagaat

SEQ ID NO: 871 - DNA, 20 bp, Artificial Sequence
  Synthetic polynucleotide
ccaatactcgggtttaagtt

SEQ ID NO: 872 - DNA, 20 bp, Artificial Sequence
  Synthetic polynucleotide
tatttcccttcatatctatc

SEQ ID NO: 873 - DNA, 20 bp, Artificial Sequence
  Synthetic polynucleotide
gatatgcgaagaagaataga

SEQ ID NO: 874 - DNA, 20 bp, Artificial Sequence
  Synthetic polynucleotide
taaacacaactcaccgtccg

SEQ ID NO: 875 - DNA, 20 bp, Artificial Sequence
  Synthetic polynucleotide
aaaaaccacaggaagttgac

SEQ ID NO: 876 - DNA, 20 bp, Artificial Sequence
  Synthetic polynucleotide
tatcaacataaccagaacag

SEQ ID NO: 877 - DNA, 20 bp, Artificial Sequence
  Synthetic polynucleotide
gacgtgcattggaaaaccat

SEQ ID NO: 878 - DNA, 20 bp, Artificial Sequence
  Synthetic polynucleotide
acttacctaaagagaacgaa

SEQ ID NO: 879 - DNA, 20 bp, Artificial Sequence
  Synthetic polynucleotide
ttaaatcacctggagtttca

SEQ ID NO: 880 - DNA, 20 bp, Artificial Sequence
  Synthetic polynucleotide
gtaattcaagtggctaaaaa

SEQ ID NO: 881 - DNA, 20 bp, Artificial Sequence
  Synthetic polynucleotide
cccagtccaattggataatt

SEQ ID NO: 882 - DNA, 20 bp, Artificial Sequence
  Synthetic polynucleotide
taaaaacgttatgatagttt

SEQ ID NO: 883 - DNA, 20 bp, Artificial Sequence
  Synthetic polynucleotide
acctcccctgtcggcttaat

SEQ ID NO: 884 - DNA, 20 bp, Artificial Sequence
  Synthetic polynucleotide
tacgcccataacgaatataa

SEQ ID NO: 885 - DNA, 20 bp, Artificial Sequence
  Synthetic polynucleotide
agttcacgtaactggagatt

SEQ ID NO: 886 - DNA, 20 bp, Artificial Sequence
  Synthetic polynucleotide
aaagatccgggataggagtt

SEQ ID NO: 887 - DNA, 20 bp, Artificial Sequence
  Synthetic polynucleotide
attattcgaaatccaatcca

SEQ ID NO: 888 - DNA, 20 bp, Artificial Sequence
  Synthetic polynucleotide
cggtttcaaattgactgcac

SEQ ID NO: 889 - DNA, 20 bp, Artificial Sequence
  Synthetic polynucleotide
atttaccaaaactcggtatc

SEQ ID NO: 890 - DNA, 20 bp, Artificial Sequence
  Synthetic polynucleotide
ggaagtcctacggtcaacag

SEQ ID NO: 891 - DNA, 20 bp, Artificial Sequence
  Synthetic polynucleotide
taggaacaagaatacggaac

SEQ ID NO: 892 - DNA, 20 bp, Artificial Sequence
  Synthetic polynucleotide
gaatgtctactgtaccaggc

SEQ ID NO: 893 - DNA, 20 bp, Artificial Sequence
  Synthetic polynucleotide
agttcacgaggataaaaccg

SEQ ID NO: 894 - DNA, 20 bp, Artificial Sequence
  Synthetic polynucleotide
agttgtctgcaagctaaatt

SEQ ID NO: 895 - DNA, 20 bp, Artificial Sequence
  Synthetic polynucleotide
cattccccttcggttatttg

SEQ ID NO: 896 - DNA, 20 bp, Artificial Sequence
  Synthetic polynucleotide
aatttgcccctaggctttct

SEQ ID NO: 897 - DNA, 20 bp, Artificial Sequence
  Synthetic polynucleotide
tgactcctcttacggtaaaa

SEQ ID NO: 898 - DNA, 20 bp, Artificial Sequence
  Synthetic polynucleotide
tccgagcaagtcggtttaca

SEQ ID NO: 899 - DNA, 20 bp, Artificial Sequence
  Synthetic polynucleotide
attagtcgcctaaggattta

SEQ ID NO: 900 - DNA, 20 bp, Artificial Sequence
  Synthetic polynucleotide
gtcccactcctacgattgat

SEQ ID NO: 901 - DNA, 20 bp, Artificial Sequence
  Synthetic polynucleotide
gagctccttcattaaggtaa

SEQ ID NO: 902 - DNA, 20 bp, Artificial Sequence
  Synthetic polynucleotide
actgtactgataatggtaaa

SEQ ID NO: 903 - DNA, 20 bp, Artificial Sequence
  Synthetic polynucleotide
attgatccttcaagagagag

SEQ ID NO: 904 - DNA, 20 bp, Artificial Sequence
  Synthetic polynucleotide
aagtccccatgtatgttgta

SEQ ID NO: 905 - DNA, 20 bp, Artificial Sequence
  Synthetic polynucleotide
tagcatccatggttgtcgtc

SEQ ID NO: 906 - DNA, 20 bp, Artificial Sequence
  Synthetic polynucleotide
atactcccatagagcatagc

SEQ ID NO: 907 - DNA, 20 bp, Artificial Sequence
  Synthetic polynucleotide
cttaaccaaagaatgacgac

SEQ ID NO: 908 - DNA, 20 bp, Artificial Sequence
  Synthetic polynucleotide
gagaaacgtacgaacaagta

SEQ ID NO: 909 - DNA, 20 bp, Artificial Sequence
  Synthetic polynucleotide
tctttacgtagcgggtttat

SEQ ID NO: 910 - DNA, 20 bp, Artificial Sequence
  Synthetic polynucleotide
cgctgccaccacggctttat

SEQ ID NO: 911 - DNA, 20 bp, Artificial Sequence
  Synthetic polynucleotide
ccactccgtgtggactttac

SEQ ID NO: 912 - DNA, 20 bp, Artificial Sequence
  Synthetic polynucleotide
attgatcataccttggtgct

SEQ ID NO: 913 - DNA, 20 bp, Artificial Sequence
  Synthetic polynucleotide
ccttgccgcgctatgcgatg

SEQ ID NO: 914 - DNA, 20 bp, Artificial Sequence
  Synthetic polynucleotide
cttagccattactgggtcct

SEQ ID NO: 915 - DNA, 20 bp, Artificial Sequence
  Synthetic polynucleotide
tatctccggatgcaagagca

SEQ ID NO: 916 - DNA, 20 bp, Artificial Sequence
  Synthetic polynucleotide
taatacctcacgagataaaa

SEQ ID NO: 917 - DNA, 20 bp, Artificial Sequence
  Synthetic polynucleotide
tttcgtcgttctacggtcca

SEQ ID NO: 918 - DNA, 20 bp, Artificial Sequence
  Synthetic polynucleotide
acatccccagttagtcagtc

SEQ ID NO: 919 - DNA, 20 bp, Artificial Sequence
  Synthetic polynucleotide
attaatccccgagccatcga

SEQ ID NO: 920 - DNA, 20 bp, Artificial Sequence
  Synthetic polynucleotide
gctgtgcccatcctaggagg

SEQ ID NO: 921 - DNA, 20 bp, Artificial Sequence
  Synthetic polynucleotide
cacgatcctctgagcacagc

SEQ ID NO: 922 - DNA, 20 bp, Artificial Sequence
  Synthetic polynucleotide
caatcccgatagacgaaaga

SEQ ID NO: 923 - DNA, 20 bp, Artificial Sequence
  Synthetic polynucleotide
aattaccggcttataaccgg

SEQ ID NO: 924 - DNA, 20 bp, Artificial Sequence
  Synthetic polynucleotide
cctgtgcacgcccagttgca

SEQ ID NO: 925 - DNA, 20 bp, Artificial Sequence
  Synthetic polynucleotide
catgaacttgtccgatttcc

SEQ ID NO: 926 - DNA, 20 bp, Artificial Sequence
  Synthetic polynucleotide
cgttgccgccccggaatttg

SEQ ID NO: 927 - DNA, 20 bp, Artificial Sequence
  Synthetic polynucleotide
gccacgcgaagtcagctgct

SEQ ID NO: 928 - DNA, 20 bp, Artificial Sequence
  Synthetic polynucleotide
ggttgacgccctaggtcact

SEQ ID NO: 929 - DNA, 20 bp, Artificial Sequence
  Synthetic polynucleotide
ccacaccactggggaagtat

SEQ ID NO: 930 - DNA, 20 bp, Artificial Sequence
  Synthetic polynucleotide
tctcgcccttgcgagttcga

SEQ ID NO: 931 - DNA, 20 bp, Artificial Sequence
  Synthetic polynucleotide
cgagcgcgcaaccgctcctc

SEQ ID NO: 932 - DNA, 20 bp, Artificial Sequence
  Synthetic polynucleotide
agccaacccacagcgtaaag

SEQ ID NO: 933 - DNA, 20 bp, Artificial Sequence
  Synthetic polynucleotide
gtcctacctccagatgggaa

SEQ ID NO: 934 - DNA, 20 bp, Artificial Sequence
  Synthetic polynucleotide
tgcgcacttgtcagatccag

SEQ ID NO: 935 - DNA, 20 bp, Artificial Sequence
  Synthetic polynucleotide
agagccctaggaacacccta

SEQ ID NO: 936 - DNA, 20 bp, Artificial Sequence
  Synthetic polynucleotide
ggctcacacacattccgtgc

SEQ ID NO: 937 - DNA, 20 bp, Artificial Sequence
  Synthetic polynucleotide
gtaacgccttaccgctgtgg

SEQ ID NO: 938 - DNA, 20 bp, Artificial Sequence
  Synthetic polynucleotide
catcatcttctcgtccgggc

SEQ ID NO: 939 - DNA, 20 bp, Artificial Sequence
  Synthetic polynucleotide
atcaaccattaaactcttct

SEQ ID NO: 940 - DNA, 20 bp, Artificial Sequence
  Synthetic polynucleotide
tcttccctttgtgataaatg

SEQ ID NO: 941 - DNA, 20 bp, Artificial Sequence
  Synthetic polynucleotide
tcttaccatggcatttaata

SEQ ID NO: 942 - DNA, 20 bp, Artificial Sequence
  Synthetic polynucleotide
aatttacaactatgggatat

SEQ ID NO: 943 - DNA, 20 bp, Artificial Sequence
  Synthetic polynucleotide
atataccagatttggagatt

SEQ ID NO: 944 - DNA, 20 bp, Artificial Sequence
  Synthetic polynucleotide
ataatacgcggttatggtta

SEQ ID NO: 945 - DNA, 20 bp, Artificial Sequence
  Synthetic polynucleotide
cgctagcatcatatggataa

SEQ ID NO: 946 - DNA, 20 bp, Artificial Sequence
  Synthetic polynucleotide
ttggttccaagatattacct

SEQ ID NO: 947 - DNA, 20 bp, Artificial Sequence
  Synthetic polynucleotide
taagtacctatattaggttc

SEQ ID NO: 948 - DNA, 20 bp, Artificial Sequence
  Synthetic polynucleotide
tatcgtcgaattagagcaag

SEQ ID NO: 949 - DNA, 20 bp, Artificial Sequence
  Synthetic polynucleotide
acgatacataggtatcaagt

SEQ ID NO: 950 - DNA, 20 bp, Artificial Sequence
  Synthetic polynucleotide
agtgaactagatacttcatt

SEQ ID NO: 951 - DNA, 20 bp, Artificial Sequence
  Synthetic polynucleotide
tatcaccggagttaaagtgg

SEQ ID NO: 952 - DNA, 20 bp, Artificial Sequence
  Synthetic polynucleotide
atatggcaggatgcaccagc

SEQ ID NO: 953 - DNA, 20 bp, Artificial Sequence
  Synthetic polynucleotide
tgactacttgtgaatcatga

SEQ ID NO: 954 - DNA, 20 bp, Artificial Sequence
  Synthetic polynucleotide
catatgctcttgtgctttct

SEQ ID NO: 955 - DNA, 20 bp, Artificial Sequence
  Synthetic polynucleotide
tcttccctggctatggttct

SEQ ID NO: 956 - DNA, 20 bp, Artificial Sequence
  Synthetic polynucleotide
gatatacgtcttccatttcc

SEQ ID NO: 957 - DNA, 20 bp, Artificial Sequence
  Synthetic polynucleotide
taaaagctttcgatttattt

SEQ ID NO: 958 - DNA, 20 bp, Artificial Sequence
  Synthetic polynucleotide
atggatccgtttaggtatat

SEQ ID NO: 959 - DNA, 20 bp, Artificial Sequence
  Synthetic polynucleotide
aaaagtctggtttgtcatca

SEQ ID NO: 960 - DNA, 20 bp, Artificial Sequence
  Synthetic polynucleotide
acatgtcccagacgtatacc

SEQ ID NO: 961 - DNA, 20 bp, Artificial Sequence
  Synthetic polynucleotide
aagcttcagctagagttagt

SEQ ID NO: 962 - DNA, 20 bp, Artificial Sequence
  Synthetic polynucleotide
aatatacaatcagttagata

SEQ ID NO: 963 - DNA, 20 bp, Artificial Sequence
  Synthetic polynucleotide
ttcacgctaaaacagacctc

SEQ ID NO: 964 - DNA, 20 bp, Artificial Sequence
  Synthetic polynucleotide
ttaggtcaacagctgtccta

SEQ ID NO: 965 - DNA, 20 bp, Artificial Sequence
  Synthetic polynucleotide
tcaaacccaaagattgttgt

SEQ ID NO: 966 - DNA, 20 bp, Artificial Sequence
  Synthetic polynucleotide
tatggcccgtatggcaaggc

SEQ ID NO: 967 - DNA, 20 bp, Artificial Sequence
  Synthetic polynucleotide
atccaacggtaactaaccac

SEQ ID NO: 968 - DNA, 20 bp, Artificial Sequence
  Synthetic polynucleotide
gatcaccttcagagtgtcag

SEQ ID NO: 969 - DNA, 20 bp, Artificial Sequence
  Synthetic polynucleotide
tacaatcgccctactcttct

SEQ ID NO: 970 - DNA, 20 bp, Artificial Sequence
  Synthetic polynucleotide
acatcgcagcggtctaattt

SEQ ID NO: 971 - DNA, 20 bp, Artificial Sequence
  Synthetic polynucleotide
ttcgtgcacttaggtatttc

SEQ ID NO: 972 - DNA, 20 bp, Artificial Sequence
  Synthetic polynucleotide
gtatctcgtagagatttaag

SEQ ID NO: 973 - DNA, 20 bp, Artificial Sequence
  Synthetic polynucleotide
ccgcctcaattacctggtct

SEQ ID NO: 974 - DNA, 20 bp, Artificial Sequence
  Synthetic polynucleotide
ggacgcccgagtttggttta

SEQ ID NO: 975 - DNA, 20 bp, Artificial Sequence
  Synthetic polynucleotide
ccttcgcttaacccggtgcc

SEQ ID NO: 976 - DNA, 20 bp, Artificial Sequence
  Synthetic polynucleotide
gagttccttcagctctatca

SEQ ID NO: 977 - DNA, 20 bp, Artificial Sequence
  Synthetic polynucleotide
tcatgccatgcgtaatcatc

SEQ ID NO: 978 - DNA, 20 bp, Artificial Sequence
  Synthetic polynucleotide
ccgctgcaagataggaacgt

SEQ ID NO: 979 - DNA, 20 bp, Artificial Sequence
  Synthetic polynucleotide
tcagagcgaacatagacgat

SEQ ID NO: 980 - DNA, 20 bp, Artificial Sequence
  Synthetic polynucleotide
ggtcatcgtgatacacagca

SEQ ID NO: 981 - DNA, 20 bp, Artificial Sequence
  Synthetic polynucleotide
gacccacattaccttacgta

SEQ ID NO: 982 - DNA, 20 bp, Artificial Sequence
  Synthetic polynucleotide
gaccaacggataacatgaga

SEQ ID NO: 983 - DNA, 20 bp, Artificial Sequence
  Synthetic polynucleotide
tctccccaggaaagatcagg

SEQ ID NO: 984 - DNA, 20 bp, Artificial Sequence
  Synthetic polynucleotide
gtgcctccggcttattatta

SEQ ID NO: 985 - DNA, 20 bp, Artificial Sequence
  Synthetic polynucleotide
tcccagctccgtcttcttct

SEQ ID NO: 986 - DNA, 20 bp, Artificial Sequence
  Synthetic polynucleotide
tctcatctccgtggctttaa

SEQ ID NO: 987 - DNA, 20 bp, Artificial Sequence
  Synthetic polynucleotide
actcatcatccggttaaacg

SEQ ID NO: 988 - DNA, 20 bp, Artificial Sequence
  Synthetic polynucleotide
ggtctccagttgtcttactt

SEQ ID NO: 989 - DNA, 20 bp, Artificial Sequence
  Synthetic polynucleotide
taggaccgcccagactatct

SEQ ID NO: 990 - DNA, 20 bp, Artificial Sequence
  Synthetic polynucleotide
gtcatgcgcattggaactat

SEQ ID NO: 991 - DNA, 20 bp, Artificial Sequence
  Synthetic polynucleotide
gacatccaaagtttgcgtcc

SEQ ID NO: 992 - DNA, 20 bp, Artificial Sequence
  Synthetic polynucleotide
cctggccctccggagatgta

SEQ ID NO: 993 - DNA, 20 bp, Artificial Sequence
  Synthetic polynucleotide
agaccgccgttaagtgccat

SEQ ID NO: 994 - DNA, 20 bp, Artificial Sequence
  Synthetic polynucleotide
ttgcgccctaatacgaccct

SEQ ID NO: 995 - DNA, 20 bp, Artificial Sequence
  Synthetic polynucleotide
catctccgcctccatggagc

SEQ ID NO: 996 - DNA, 20 bp, Artificial Sequence
  Synthetic polynucleotide
tcctaccatctaagcgatgg

SEQ ID NO: 997 - DNA, 20 bp, Artificial Sequence
  Synthetic polynucleotide
taagcacctatcgaccccga

SEQ ID NO: 998 - DNA, 20 bp, Artificial Sequence
  Synthetic polynucleotide
gaatcgctgatctgcaacac

SEQ ID NO: 999 - DNA, 20 bp, Artificial Sequence
  Synthetic polynucleotide
ctatagcacccgggaattca

SEQ ID NO: 1000 - DNA, 20 bp, Artificial Sequence
  Synthetic polynucleotide
gcttccccgtctgctgatct

SEQ ID NO: 1001 - DNA, 20 bp, Artificial Sequence
  Synthetic polynucleotide
gcggtccgactcttagttct

SEQ ID NO: 1002 - DNA, 20 bp, Artificial Sequence
  Synthetic polynucleotide
ctatcgcaccctgttgaatg

SEQ ID NO: 1003 - DNA, 20 bp, Artificial Sequence
  Synthetic polynucleotide
ttagtcccccagggctttag

SEQ ID NO: 1004 - DNA, 20 bp, Artificial Sequence
  Synthetic polynucleotide
ggcgcccggacgagtcttac

SEQ ID NO: 1005 - DNA, 20 bp, Artificial Sequence
  Synthetic polynucleotide
gcacccctcatcgctgctgc

SEQ ID NO: 1006 - DNA, 20 bp, Artificial Sequence
  Synthetic polynucleotide
gtgtcgccggtctacattac

SEQ ID NO: 1007 - DNA, 20 bp, Artificial Sequence
  Synthetic polynucleotide
ggttgaccgcaatgccaaat

SEQ ID NO: 1008 - DNA, 20 bp, Artificial Sequence
  Synthetic polynucleotide
atcggccttccaaagacgaa

SEQ ID NO: 1009 - DNA, 20 bp, Artificial Sequence
  Synthetic polynucleotide
caacgtctcttaccatgcgc

SEQ ID NO: 1010 - DNA, 20 bp, Artificial Sequence
  Synthetic polynucleotide
tttgcacggtacaatggcat

SEQ ID NO: 1011 - DNA, 20 bp, Artificial Sequence
  Synthetic polynucleotide
attgctcgagaactgacatc

SEQ ID NO: 1012 - DNA, 20 bp, Artificial Sequence
  Synthetic polynucleotide
ccttctccccaacggacgta

SEQ ID NO: 1013 - DNA, 20 bp, Artificial Sequence
  Synthetic polynucleotide
gttccacctatcagacacag

SEQ ID NO: 1014 - DNA, 20 bp, Artificial Sequence
  Synthetic polynucleotide
actaaaccgttattgtttcg

SEQ ID NO: 1015 - DNA, 20 bp, Artificial Sequence
  Synthetic polynucleotide
aattgtctttaatctattat

SEQ ID NO: 1016 - DNA, 20 bp, Artificial Sequence
  Synthetic polynucleotide
gcttggcgatgattaattat

SEQ ID NO: 1017 - DNA, 20 bp, Artificial Sequence
  Synthetic polynucleotide
agaaatcagttcacttaatc

SEQ ID NO: 1018 - DNA, 20 bp, Artificial Sequence
  Synthetic polynucleotide
aactttcataatccttatct

SEQ ID NO: 1019 - DNA, 20 bp, Artificial Sequence
  Synthetic polynucleotide
aaatcgcatggcataaatat

SEQ ID NO: 1020 - DNA, 20 bp, Artificial Sequence
  Synthetic polynucleotide
taatagcaatgtatgaaaaa

SEQ ID NO: 1021 - DNA, 20 bp, Artificial Sequence
  Synthetic polynucleotide
ttataccttaaaaagtctca

SEQ ID NO: 1022 - DNA, 20 bp, Artificial Sequence
  Synthetic polynucleotide
cactatcaacaatgattaat

SEQ ID NO: 1023 - DNA, 20 bp, Artificial Sequence
  Synthetic polynucleotide
attacacctgattgatttgt

SEQ ID NO: 1024 - DNA, 20 bp, Artificial Sequence
  Synthetic polynucleotide
acacctcgaatgaatcgaat

SEQ ID NO: 1025 - DNA, 20 bp, Artificial Sequence
  Synthetic polynucleotide
ttattgcggatattgataga

SEQ ID NO: 1026 - DNA, 20 bp, Artificial Sequence
  Synthetic polynucleotide
ttaccactaaacattgcagc

SEQ ID NO: 1027 - DNA, 20 bp, Artificial Sequence
  Synthetic polynucleotide
catgttcaacaaaccgacaa

SEQ ID NO: 1028 - DNA, 20 bp, Artificial Sequence
  Synthetic polynucleotide
aaaagtcaaatgcaaacgag

SEQ ID NO: 1029 - DNA, 20 bp, Artificial Sequence
  Synthetic polynucleotide
ttgagtctgtcgatttattt

SEQ ID NO: 1030 - DNA, 20 bp, Artificial Sequence
  Synthetic polynucleotide
agagccccacctgattattt

SEQ ID NO: 1031 - DNA, 20 bp, Artificial Sequence
  Synthetic polynucleotide
tggtcgcaattacattaatt

SEQ ID NO: 1032 - DNA, 20 bp, Artificial Sequence
  Synthetic polynucleotide
acgactctcgagaagtattt

SEQ ID NO: 1033 - DNA, 20 bp, Artificial Sequence
  Synthetic polynucleotide
tctggacagacatcatatat

SEQ ID NO: 1034 - DNA, 20 bp, Artificial Sequence
  Synthetic polynucleotide
attcttcttgggtgctcttt

SEQ ID NO: 1035 - DNA, 20 bp, Artificial Sequence
  Synthetic polynucleotide
agaacacatgctgtctgttg

SEQ ID NO: 1036 - DNA, 20 bp, Artificial Sequence
  Synthetic polynucleotide
tttatactgtgaagtcagta

SEQ ID NO: 1037 - DNA, 20 bp, Artificial Sequence
  Synthetic polynucleotide
catatgcgcctgcgaaagca

SEQ ID NO: 1038 - DNA, 20 bp, Artificial Sequence
  Synthetic polynucleotide
atcgacctaatcgacagcaa

SEQ ID NO: 1039 - DNA, 20 bp, Artificial Sequence
  Synthetic polynucleotide
ttgatactagactgacgatc

SEQ ID NO: 1040 - DNA, 20 bp, Artificial Sequence
  Synthetic polynucleotide
ttatggcaacattcagcata

SEQ ID NO: 1041 - DNA, 20 bp, Artificial Sequence
  Synthetic polynucleotide
tatatgcgaggtgacaacac

SEQ ID NO: 1042 - DNA, 20 bp, Artificial Sequence
  Synthetic polynucleotide
atatgtccctagaccgtagg

SEQ ID NO: 1043 - DNA, 20 bp, Artificial Sequence
  Synthetic polynucleotide
ctaagacgaggttagatcgg

SEQ ID NO: 1044 - DNA, 20 bp, Artificial Sequence
  Synthetic polynucleotide
gtatatcacgatggataaat

SEQ ID NO: 1045 - DNA, 20 bp, Artificial Sequence
  Synthetic polynucleotide
atatctcgcggtcgtaaatg

SEQ ID NO: 1046 - DNA, 20 bp, Artificial Sequence
  Synthetic polynucleotide
tctgaactctctactattct

SEQ ID NO: 1047 - DNA, 20 bp, Artificial Sequence
  Synthetic polynucleotide
tgcgcccgaacttagtaact

SEQ ID NO: 1048 - DNA, 20 bp, Artificial Sequence
  Synthetic polynucleotide
tcatcacactctctgttctt

SEQ ID NO: 1049 - DNA, 20 bp, Artificial Sequence
  Synthetic polynucleotide
cctcggcctgatagttatct

SEQ ID NO: 1050 - DNA, 20 bp, Artificial Sequence
  Synthetic polynucleotide
ttccagcaaaaagtacagca

SEQ ID NO: 1051 - DNA, 20 bp, Artificial Sequence
  Synthetic polynucleotide
acacttcaatttgctatggc

SEQ ID NO: 1052 - DNA, 20 bp, Artificial Sequence
  Synthetic polynucleotide
ttagcccaacgaatcggtcc

SEQ ID NO: 1053 - DNA, 20 bp, Artificial Sequence
  Synthetic polynucleotide
ctttcacgtcaggtgaggta

SEQ ID NO: 1054 - DNA, 20 bp, Artificial Sequence
  Synthetic polynucleotide
actgatccgaggtcatctgt

SEQ ID NO: 1055 - DNA, 20 bp, Artificial Sequence
  Synthetic polynucleotide
tacagaccgtataggtctga

SEQ ID NO: 1056 - DNA, 20 bp, Artificial Sequence
  Synthetic polynucleotide
tacatacaagggatttcagg

SEQ ID NO: 1057 - DNA, 20 bp, Artificial Sequence
  Synthetic polynucleotide
taacgtcatgagtagagggc

SEQ ID NO: 1058 - DNA, 20 bp, Artificial Sequence
  Synthetic polynucleotide
tagcttcacaactgaccgat

SEQ ID NO: 1059 - DNA, 20 bp, Artificial Sequence
  Synthetic polynucleotide
acaatgctgtcgtttcatct

SEQ ID NO: 1060 - DNA, 20 bp, Artificial Sequence
  Synthetic polynucleotide
cactgccggcgtccataatc

SEQ ID NO: 1061 - DNA, 20 bp, Artificial Sequence
  Synthetic polynucleotide
tatctactaacctggtttcg

SEQ ID NO: 1062 - DNA, 20 bp, Artificial Sequence
  Synthetic polynucleotide
ctatgtctgttcctctagct

SEQ ID NO: 1063 - DNA, 20 bp, Artificial Sequence
  Synthetic polynucleotide
gttgaccctcttgttgtttc

SEQ ID NO: 1064 - DNA, 20 bp, Artificial Sequence
  Synthetic polynucleotide
cttgctcatggtgcgagcct

SEQ ID NO: 1065 - DNA, 20 bp, Artificial Sequence
  Synthetic polynucleotide
cagttgcgtccggcagtaaa

SEQ ID NO: 1066 - DNA, 20 bp, Artificial Sequence
  Synthetic polynucleotide
gcacagccttcaatttggcc

SEQ ID NO: 1067 - DNA, 20 bp, Artificial Sequence
  Synthetic polynucleotide
acgacccggtcaggtgactc

SEQ ID NO: 1068 - DNA, 20 bp, Artificial Sequence
  Synthetic polynucleotide
tgaggacaaaaagaaggaac

SEQ ID NO: 1069 - DNA, 20 bp, Artificial Sequence
  Synthetic polynucleotide
tgctgacattgagctaccct

SEQ ID NO: 1070 - DNA, 20 bp, Artificial Sequence
  Synthetic polynucleotide
tgagaccctttcggcgatgc

SEQ ID NO: 1071 - DNA, 20 bp, Artificial Sequence
  Synthetic polynucleotide
gtcatccgatacttccgaga

SEQ ID NO: 1072 - DNA, 20 bp, Artificial Sequence
  Synthetic polynucleotide
aacgatcagaagaccgagta

SEQ ID NO: 1073 - DNA, 20 bp, Artificial Sequence
  Synthetic polynucleotide
agaaggctcaagatcccgaa

SEQ ID NO: 1074 - DNA, 20 bp, Artificial Sequence
  Synthetic polynucleotide
cggcccctgacgggttgttt

SEQ ID NO: 1075 - DNA, 20 bp, Artificial Sequence
  Synthetic polynucleotide
tcgtcgccccactcatttca

SEQ ID NO: 1076 - DNA, 20 bp, Artificial Sequence
  Synthetic polynucleotide
ccgggtcggaatcctcttat

SEQ ID NO: 1077 - DNA, 20 bp, Artificial Sequence
  Synthetic polynucleotide
gaggagcagcgacaggattt

SEQ ID NO: 1078 - DNA, 20 bp, Artificial Sequence
  Synthetic polynucleotide
cactaacccagggtctctat

SEQ ID NO: 1079 - DNA, 20 bp, Artificial Sequence
  Synthetic polynucleotide
tgacgtccccttggcttatg

SEQ ID NO: 1080 - DNA, 20 bp, Artificial Sequence
  Synthetic polynucleotide
acggtccctgttccagcgtt

SEQ ID NO: 1081 - DNA, 20 bp, Artificial Sequence
  Synthetic polynucleotide
cgccctccgctagcagcgac

SEQ ID NO: 1082 - DNA, 20 bp, Artificial Sequence
  Synthetic polynucleotide
gctcagcctattaggtcccg

SEQ ID NO: 1083 - DNA, 20 bp, Artificial Sequence
  Synthetic polynucleotide
accccccaagtcgaatacat

SEQ ID NO: 1084 - DNA, 20 bp, Artificial Sequence
  Synthetic polynucleotide
gtacatcgcaagtccctgaa

SEQ ID NO: 1085 - DNA, 20 bp, Artificial Sequence
  Synthetic polynucleotide
accgcgcccacaaaaatcgc

SEQ ID NO: 1086 - DNA, 20 bp, Artificial Sequence
  Synthetic polynucleotide
aacaacccccagaacgtcgg

SEQ ID NO: 1087 - DNA, 20 bp, Artificial Sequence
  Synthetic polynucleotide
gaccgcctatcgtgcaccgg

SEQ ID NO: 1088 - DNA, 20 bp, Artificial Sequence
  Synthetic polynucleotide
tagtacccccacttgacatt

SEQ ID NO: 1089 - DNA, 20 bp, Artificial Sequence
  Synthetic polynucleotide
gtattgcagtcaaataaatt

SEQ ID NO: 1090 - DNA, 20 bp, Artificial Sequence
  Synthetic polynucleotide
caccggcttgttaaataatt

SEQ ID NO: 1091 - DNA, 20 bp, Artificial Sequence
  Synthetic polynucleotide
tccatacttacgtaataatt

SEQ ID NO: 1092 - DNA, 20 bp, Artificial Sequence
  Synthetic polynucleotide
tgtactcaccttgatagtaa

SEQ ID NO: 1093 - DNA, 20 bp, Artificial Sequence
  Synthetic polynucleotide
acttatctcggagtcatatt

SEQ ID NO: 1094 - DNA, 20 bp, Artificial Sequence
  Synthetic polynucleotide
gaaattccccttagatgttt

SEQ ID NO: 1095 - DNA, 20 bp, Artificial Sequence
  Synthetic polynucleotide
acatgacatgctaatagatc

SEQ ID NO: 1096 - DNA, 20 bp, Artificial Sequence
  Synthetic polynucleotide
aggacacatctcagaaaatc

SEQ ID NO: 1097 - DNA, 20 bp, Artificial Sequence
  Synthetic polynucleotide
agttgtcgctcgataatata

SEQ ID NO: 1098 - DNA, 20 bp, Artificial Sequence
  Synthetic polynucleotide
ttctaccataagtccgccac

SEQ ID NO: 1099 - DNA, 20 bp, Artificial Sequence
  Synthetic polynucleotide
acagtacgatcttaaaggta

SEQ ID NO: 1100 - DNA, 20 bp, Artificial Sequence
  Synthetic polynucleotide
ttggatcattcaagaaaagg

SEQ ID NO: 1101 - DNA, 20 bp, Artificial Sequence
  Synthetic polynucleotide
gtatatcatatgttcagggg

SEQ ID NO: 1102 - DNA, 20 bp, Artificial Sequence
  Synthetic polynucleotide
ttctggctgataagcatgac

SEQ ID NO: 1103 - DNA, 20 bp, Artificial Sequence
  Synthetic polynucleotide
aacagtctttaaaaatgagg

SEQ ID NO: 1104 - DNA, 20 bp, Artificial Sequence
  Synthetic polynucleotide
tttcaccgtggctcataatt

SEQ ID NO: 1105 - DNA, 20 bp, Artificial Sequence
  Synthetic polynucleotide
cgctttctgtttcatattct

SEQ ID NO: 1106 - DNA, 20 bp, Artificial Sequence
  Synthetic polynucleotide
cacattcgtaaggattattt

SEQ ID NO: 1107 - DNA, 20 bp, Artificial Sequence
  Synthetic polynucleotide
ttagttcctagcgagtctct

SEQ ID NO: 1108 - DNA, 20 bp, Artificial Sequence
  Synthetic polynucleotide
ccaattcgttggacttatct

SEQ ID NO: 1109 - DNA, 20 bp, Artificial Sequence
  Synthetic polynucleotide
ttgttactttatcctttgca

SEQ ID NO: 1110 - DNA, 20 bp, Artificial Sequence
  Synthetic polynucleotide
ttgtttctagttcgctgata

SEQ ID NO: 1111 - DNA, 20 bp, Artificial Sequence
  Synthetic polynucleotide
gttctacagattgcttgtac

SEQ ID NO: 1112 - DNA, 20 bp, Artificial Sequence
  Synthetic polynucleotide
cacaatctgagtggcaatac

SEQ ID NO: 1113 - DNA, 20 bp, Artificial Sequence
  Synthetic polynucleotide
aacaggctttctccaactgc

SEQ ID NO: 1114 - DNA, 20 bp, Artificial Sequence
  Synthetic polynucleotide
cttatgcttctaataagcgt

SEQ ID NO: 1115 - DNA, 20 bp, Artificial Sequence
  Synthetic polynucleotide
atttgccgagcataagaaca

SEQ ID NO: 1116 - DNA, 20 bp, Artificial Sequence
  Synthetic polynucleotide
agccctcgataatacaggta

SEQ ID NO: 1117 - DNA, 20 bp, Artificial Sequence
  Synthetic polynucleotide
tagaccccttcaagtaacgt

SEQ ID NO: 1118 - DNA, 20 bp, Artificial Sequence
  Synthetic polynucleotide
agactccagacctatcctgc

SEQ ID NO: 1119 - DNA, 20 bp, Artificial Sequence
  Synthetic polynucleotide
ggaaccctggggtttattct

SEQ ID NO: 1120 - DNA, 20 bp, Artificial Sequence
  Synthetic polynucleotide
tcaagcctgcgctaatttac

SEQ ID NO: 1121 - DNA, 20 bp, Artificial Sequence
  Synthetic polynucleotide
actcaccctctgcgttattg

SEQ ID NO: 1122 - DNA, 20 bp, Artificial Sequence
  Synthetic polynucleotide
tagagtcatatgcgtgttat

SEQ ID NO: 1123 - DNA, 20 bp, Artificial Sequence
  Synthetic polynucleotide
ctggcgcagcatagaattat

SEQ ID NO: 1124 - DNA, 20 bp, Artificial Sequence
  Synthetic polynucleotide
tgagatcacggtacgtttaa

SEQ ID NO: 1125 - DNA, 20 bp, Artificial Sequence
  Synthetic polynucleotide
taaaaccaggcccgaataga

SEQ ID NO: 1126 - DNA, 20 bp, Artificial Sequence
  Synthetic polynucleotide
tatgggccatgtagtatcat

SEQ ID NO: 1127 - DNA, 20 bp, Artificial Sequence
  Synthetic polynucleotide
cccgtgcttgataaagtaaa

SEQ ID NO: 1128 - DNA, 20 bp, Artificial Sequence
  Synthetic polynucleotide
atctttctttgtagcaaaga

SEQ ID NO: 1129 - DNA, 20 bp, Artificial Sequence
  Synthetic polynucleotide
tattagcagaagtaagcgct

SEQ ID NO: 1130 - DNA, 20 bp, Artificial Sequence
  Synthetic polynucleotide
atgacccatacgtcacagag

SEQ ID NO: 1131 - DNA, 20 bp, Artificial Sequence
  Synthetic polynucleotide
gctacacggaatggaacgta

SEQ ID NO: 1132 - DNA, 20 bp, Artificial Sequence
  Synthetic polynucleotide
atgacgcactgaatcgtaga

SEQ ID NO: 1133 - DNA, 20 bp, Artificial Sequence
  Synthetic polynucleotide
tgagttcttcaataccgtgg

SEQ ID NO: 1134 - DNA, 20 bp, Artificial Sequence
  Synthetic polynucleotide
gccgcccacgttatgcttct

SEQ ID NO: 1135 - DNA, 20 bp, Artificial Sequence
  Synthetic polynucleotide
ctgtctcggtttacctttcc

SEQ ID NO: 1136 - DNA, 20 bp, Artificial Sequence
  Synthetic polynucleotide
agtggccgccttgctttcta

SEQ ID NO: 1137 - DNA, 20 bp, Artificial Sequence
  Synthetic polynucleotide
tgacagccctgcaggagttg

SEQ ID NO: 1138 - DNA, 20 bp, Artificial Sequence
  Synthetic polynucleotide
tatagcccgctacatgaaac

SEQ ID NO: 1139 - DNA, 20 bp, Artificial Sequence
  Synthetic polynucleotide
ccgacccagtgttgtactct

SEQ ID NO: 1140 - DNA, 20 bp, Artificial Sequence
  Synthetic polynucleotide
ttattacagggatgttacta

SEQ ID NO: 1141 - DNA, 20 bp, Artificial Sequence
  Synthetic polynucleotide
gcaatgcaccattagcaccc

SEQ ID NO: 1142 - DNA, 20 bp, Artificial Sequence
  Synthetic polynucleotide
aggtccccgccagatatgaa

SEQ ID NO: 1143 - DNA, 20 bp, Artificial Sequence
  Synthetic polynucleotide
aatgttctaaagaaccgcag

SEQ ID NO: 1144 - DNA, 20 bp, Artificial Sequence
  Synthetic polynucleotide
aacaagcatccgacaaaccc

SEQ ID NO: 1145 - DNA, 20 bp, Artificial Sequence
  Synthetic polynucleotide
tgtagcccttagtatgtaac

SEQ ID NO: 1146 - DNA, 20 bp, Artificial Sequence
  Synthetic polynucleotide
aacgtaccatcatagagagg

SEQ ID NO: 1147 - DNA, 20 bp, Artificial Sequence
  Synthetic polynucleotide
ggatctccgatatagcgaga

SEQ ID NO: 1148 - DNA, 20 bp, Artificial Sequence
  Synthetic polynucleotide
acatgaccggtctaacgaga

SEQ ID NO: 1149 - DNA, 20 bp, Artificial Sequence
  Synthetic polynucleotide
ccctgcccccccgatgtttc

SEQ ID NO: 1150 - DNA, 20 bp, Artificial Sequence
  Synthetic polynucleotide
ggcagtcctggggagattct

SEQ ID NO: 1151 - DNA, 20 bp, Artificial Sequence
  Synthetic polynucleotide
gcgctacggcctctatttcg

SEQ ID NO: 1152 - DNA, 20 bp, Artificial Sequence
  Synthetic polynucleotide
cgcttcccggatacagtttg

SEQ ID NO: 1153 - DNA, 20 bp, Artificial Sequence
  Synthetic polynucleotide
gacgagcggggacggactct

SEQ ID NO: 1154 - DNA, 20 bp, Artificial Sequence
  Synthetic polynucleotide
ggccccctgtcacatcgctt

SEQ ID NO: 1155 - DNA, 20 bp, Artificial Sequence
  Synthetic polynucleotide
atccaactgtggaccatatg

SEQ ID NO: 1156 - DNA, 20 bp, Artificial Sequence
  Synthetic polynucleotide
cccttcccccccggcgagtt

SEQ ID NO: 1157 - DNA, 20 bp, Artificial Sequence
  Synthetic polynucleotide
cgagagcctgagcaataccg

SEQ ID NO: 1158 - DNA, 20 bp, Artificial Sequence
  Synthetic polynucleotide
ctcagtctatagcccccgcg

SEQ ID NO: 1159 - DNA, 20 bp, Artificial Sequence
  Synthetic polynucleotide
catcaacgaagtagaacata

SEQ ID NO: 1160 - DNA, 20 bp, Artificial Sequence
  Synthetic polynucleotide
ctgcccctggaacaccatga

SEQ ID NO: 1161 - DNA, 20 bp, Artificial Sequence
  Synthetic polynucleotide
tacgcgcgaggaccctgtga

SEQ ID NO: 1162 - DNA, 20 bp, Artificial Sequence
  Synthetic polynucleotide
cgccgacgctatcttatggc

SEQ ID NO: 1163 - DNA, 20 bp, Artificial Sequence
  Synthetic polynucleotide
ggactaccaatgttagacgc

SEQ ID NO: 1164 - DNA, 20 bp, Artificial Sequence
  Synthetic polynucleotide
atatttcggagcgttaaatc

SEQ ID NO: 1165 - DNA, 20 bp, Artificial Sequence
  Synthetic polynucleotide
gtatttctatactaatttat

SEQ ID NO: 1166 - DNA, 20 bp, Artificial Sequence
  Synthetic polynucleotide
atatttctgatcaataattt

SEQ ID NO: 1167 - DNA, 20 bp, Artificial Sequence
  Synthetic polynucleotide
aatatccctgtgattgattt

SEQ ID NO: 1168 - DNA, 20 bp, Artificial Sequence
  Synthetic polynucleotide
ggcgaacgacgtgaaaaata

SEQ ID NO: 1169 - DNA, 20 bp, Artificial Sequence
  Synthetic polynucleotide
agttatcaggcatttaaaag

SEQ ID NO: 1170 - DNA, 20 bp, Artificial Sequence
  Synthetic polynucleotide
gctaggctgagacaatcatt

SEQ ID NO: 1171 - DNA, 20 bp, Artificial Sequence
  Synthetic polynucleotide
ctctcacatgtcatgtactt

SEQ ID NO: 1172 - DNA, 20 bp, Artificial Sequence
  Synthetic polynucleotide
cagaagcatatttaattaca

SEQ ID NO: 1173 - DNA, 20 bp, Artificial Sequence
  Synthetic polynucleotide
caagttcttacaaaactgaa

SEQ ID NO: 1174 - DNA, 20 bp, Artificial Sequence
  Synthetic polynucleotide
atggatcctaataaattagc

SEQ ID NO: 1175 - DNA, 20 bp, Artificial Sequence
  Synthetic polynucleotide
acgattcgattaaaatggta

SEQ ID NO: 1176 - DNA, 20 bp, Artificial Sequence
  Synthetic polynucleotide
atttagccagtactgacagg

SEQ ID NO: 1177 - DNA, 20 bp, Artificial Sequence
  Synthetic polynucleotide
aaagacctgatatgaaccaa

SEQ ID NO: 1178 - DNA, 20 bp, Artificial Sequence
  Synthetic polynucleotide
ctgaatcgaaattcagtgga

SEQ ID NO: 1179 - DNA, 20 bp, Artificial Sequence
  Synthetic polynucleotide
tccgtccaaacatttatttc

SEQ ID NO: 1180 - DNA, 20 bp, Artificial Sequence
  Synthetic polynucleotide
cacacacgggtatcttaaat

SEQ ID NO: 1181 - DNA, 20 bp, Artificial Sequence
  Synthetic polynucleotide
agacaacttcctgtttaatt

SEQ ID NO: 1182 - DNA, 20 bp, Artificial Sequence
  Synthetic polynucleotide
ctaaagctatgttagtaatt

SEQ ID NO: 1183 - DNA, 20 bp, Artificial Sequence
  Synthetic polynucleotide
gagcatcagtccccgaatta

SEQ ID NO: 1184 - DNA, 20 bp, Artificial Sequence
  Synthetic polynucleotide
gcctagcctctagcgaatta

SEQ ID NO: 1185 - DNA, 20 bp, Artificial Sequence
  Synthetic polynucleotide
atacatctcgttagcagttt

SEQ ID NO: 1186 - DNA, 20 bp, Artificial Sequence
  Synthetic polynucleotide
tctacgctataagacataac

SEQ ID NO: 1187 - DNA, 20 bp, Artificial Sequence
  Synthetic polynucleotide
ttagctcctttctttaggtg

SEQ ID NO: 1188 - DNA, 20 bp, Artificial Sequence
  Synthetic polynucleotide
gtcagacgaaaatcaaagag

SEQ ID NO: 1189 - DNA, 20 bp, Artificial Sequence
  Synthetic polynucleotide
aggtgaccagcacataaggg

SEQ ID NO: 1190 - DNA, 20 bp, Artificial Sequence
  Synthetic polynucleotide
gtacagcttatatttagagg

SEQ ID NO: 1191 - DNA, 20 bp, Artificial Sequence
  Synthetic polynucleotide
aatgtgcacagtaatcctgg

SEQ ID NO: 1192 - DNA, 20 bp, Artificial Sequence
  Synthetic polynucleotide
agcccccagatatcaatcgg

SEQ ID NO: 1193 - DNA, 20 bp, Artificial Sequence
  Synthetic polynucleotide
cgtaaacagaatttcctagt

SEQ ID NO: 1194 - DNA, 20 bp, Artificial Sequence
  Synthetic polynucleotide
gaatgcctcctgacatttct

SEQ ID NO: 1195 - DNA, 20 bp, Artificial Sequence
  Synthetic polynucleotide
cgttgtcggatatcttaatt

SEQ ID NO: 1196 - DNA, 20 bp, Artificial Sequence
  Synthetic polynucleotide
gctggcccttgtacttaatt

SEQ ID NO: 1197 - DNA, 20 bp, Artificial Sequence
  Synthetic polynucleotide
caaggacatactgctaatta

SEQ ID NO: 1198 - DNA, 20 bp, Artificial Sequence
  Synthetic polynucleotide
caatagccaccttgacttta

SEQ ID NO: 1199 - DNA, 20 bp, Artificial Sequence
  Synthetic polynucleotide
gggatgcagtgaacaaatta

SEQ ID NO: 1200 - DNA, 20 bp, Artificial Sequence
  Synthetic polynucleotide
ctttcacaagtaagtattcg

SEQ ID NO: 1201 - DNA, 20 bp, Artificial Sequence
  Synthetic polynucleotide
acgtatcagttcttgtggca

SEQ ID NO: 1202 - DNA, 20 bp, Artificial Sequence
  Synthetic polynucleotide
ctttggctccacgaatactg

SEQ ID NO: 1203 - DNA, 20 bp, Artificial Sequence
  Synthetic polynucleotide
tctttgcaagagaacttggt

SEQ ID NO: 1204 - DNA, 20 bp, Artificial Sequence
  Synthetic polynucleotide
tataatcagcccacgacaaa

SEQ ID NO: 1205 - DNA, 20 bp, Artificial Sequence
  Synthetic polynucleotide
cctttacactacataaagcc

SEQ ID NO: 1206 - DNA, 20 bp, Artificial Sequence
  Synthetic polynucleotide
ggaagacttcagtacacgcc

SEQ ID NO: 1207 - DNA, 20 bp, Artificial Sequence
  Synthetic polynucleotide
cgtcctcaaacttagacgtg

SEQ ID NO: 1208 - DNA, 20 bp, Artificial Sequence
  Synthetic polynucleotide
aggtgacgtcatatcgctga

SEQ ID NO: 1209 - DNA, 20 bp, Artificial Sequence
  Synthetic polynucleotide
ttggctcgcgtaacttaaaa

SEQ ID NO: 1210 - DNA, 20 bp, Artificial Sequence
  Synthetic polynucleotide
gaaggaccactagattaaat

SEQ ID NO: 1211 - DNA, 20 bp, Artificial Sequence
  Synthetic polynucleotide
gagcggccgtttccctttca

SEQ ID NO: 1212 - DNA, 20 bp, Artificial Sequence
  Synthetic polynucleotide
tcgtagcagctcctatataa

SEQ ID NO: 1213 - DNA, 20 bp, Artificial Sequence
  Synthetic polynucleotide
ttgagccgttggcttagtaa

SEQ ID NO: 1214 - DNA, 20 bp, Artificial Sequence
  Synthetic polynucleotide
aggggtctcccgttacatct

SEQ ID NO: 1215 - DNA, 20 bp, Artificial Sequence
  Synthetic polynucleotide
tgattccaattcccgtagct

SEQ ID NO: 1216 - DNA, 20 bp, Artificial Sequence
  Synthetic polynucleotide
gcaattcgagcagacgaatt

SEQ ID NO: 1217 - DNA, 20 bp, Artificial Sequence
  Synthetic polynucleotide
gttattctcaaccgcatctg

SEQ ID NO: 1218 - DNA, 20 bp, Artificial Sequence
  Synthetic polynucleotide
gactgccctcgaaccgaggt

SEQ ID NO: 1219 - DNA, 20 bp, Artificial Sequence
  Synthetic polynucleotide
gtccatcccataccgctggg

SEQ ID NO: 1220 - DNA, 20 bp, Artificial Sequence
  Synthetic polynucleotide
tcataacttgactctattgc

SEQ ID NO: 1221 - DNA, 20 bp, Artificial Sequence
  Synthetic polynucleotide
ctgcgcctgttcacaacgag

SEQ ID NO: 1222 - DNA, 20 bp, Artificial Sequence
  Synthetic polynucleotide
ggagatcccgaaacaccggc

SEQ ID NO: 1223 - DNA, 20 bp, Artificial Sequence
  Synthetic polynucleotide
ggagatctccttcccaatgg

SEQ ID NO: 1224 - DNA, 20 bp, Artificial Sequence
  Synthetic polynucleotide
gccctcccgctccgttataa

SEQ ID NO: 1225 - DNA, 20 bp, Artificial Sequence
  Synthetic polynucleotide
tcccagcgcgcactataaac

SEQ ID NO: 1226 - DNA, 20 bp, Artificial Sequence
  Synthetic polynucleotide
tgctcacgcgaagcttaaac

SEQ ID NO: 1227 - DNA, 20 bp, Artificial Sequence
  Synthetic polynucleotide
cgcgtgcgacggccaatatc

SEQ ID NO: 1228 - DNA, 20 bp, Artificial Sequence
  Synthetic polynucleotide
ctgcctctgcgctctctaag

SEQ ID NO: 1229 - DNA, 20 bp, Artificial Sequence
  Synthetic polynucleotide
ctgctccgactcttagttat

SEQ ID NO: 1230 - DNA, 20 bp, Artificial Sequence
  Synthetic polynucleotide
ccggctcgcttccagcagtg

SEQ ID NO: 1231 - DNA, 20 bp, Artificial Sequence
  Synthetic polynucleotide
gggctcccgacgcaccattg

SEQ ID NO: 1232 - DNA, 20 bp, Artificial Sequence
  Synthetic polynucleotide
ccgtcgcgccctatactgaa

SEQ ID NO: 1233 - DNA, 20 bp, Artificial Sequence
  Synthetic polynucleotide
cctggcctagcctaacaggt

SEQ ID NO: 1234 - DNA, 20 bp, Artificial Sequence
  Synthetic polynucleotide
taacgacaccactctgcgta

SEQ ID NO: 1235 - DNA, 20 bp, Artificial Sequence
  Synthetic polynucleotide
ataagacctcctcgtccggt

SEQ ID NO: 1236 - DNA, 20 bp, Artificial Sequence
  Synthetic polynucleotide
tagtgacgcaatcacaagag

SEQ ID NO: 1237 - DNA, 20 bp, Artificial Sequence
  Synthetic polynucleotide
gggcctccacttaacacgga

SEQ ID NO: 1238 - DNA, 20 bp, Artificial Sequence
  Synthetic polynucleotide
gatcagcaactccgctgggt

SEQ ID NO: 1239 - DNA, 20 bp, Artificial Sequence
  Synthetic polynucleotide
atccttcctataggtaattt

SEQ ID NO: 1240 - DNA, 20 bp, Artificial Sequence
  Synthetic polynucleotide
ttctgtctgggtagtattct

SEQ ID NO: 1241 - DNA, 20 bp, Artificial Sequence
  Synthetic polynucleotide
aaagtgcaatggttatttat

SEQ ID NO: 1242 - DNA, 20 bp, Artificial Sequence
  Synthetic polynucleotide
aaagcccattcggatttctt

SEQ ID NO: 1243 - DNA, 20 bp, Artificial Sequence
  Synthetic polynucleotide
tatatgctgggcactctata

SEQ ID NO: 1244 - DNA, 20 bp, Artificial Sequence
  Synthetic polynucleotide
catttacacataatttgatt

SEQ ID NO: 1245 - DNA, 20 bp, Artificial Sequence
  Synthetic polynucleotide
ttattacttgaaaaaggaaa

SEQ ID NO: 1246 - DNA, 20 bp, Artificial Sequence
  Synthetic polynucleotide
aatgtcctttgtgggtttga

SEQ ID NO: 1247 - DNA, 20 bp, Artificial Sequence
  Synthetic polynucleotide
tacggtctaaaggtaataaa

SEQ ID NO: 1248 - DNA, 20 bp, Artificial Sequence
  Synthetic polynucleotide
tagttgcaatgactaaccaa

SEQ ID NO: 1249 - DNA, 20 bp, Artificial Sequence
  Synthetic polynucleotide
ataaagctgtaagagctaag

SEQ ID NO: 1250 - DNA, 20 bp, Artificial Sequence
  Synthetic polynucleotide
attacacatagtggattgat

SEQ ID NO: 1251 - DNA, 20 bp, Artificial Sequence
  Synthetic polynucleotide
tcgaacctaagaaacaaagt

SEQ ID NO: 1252 - DNA, 20 bp, Artificial Sequence
  Synthetic polynucleotide
tacgcgcaaattagaccaga

SEQ ID NO: 1253 - DNA, 20 bp, Artificial Sequence
  Synthetic polynucleotide
aaatgtcgatcatgaagtga

SEQ ID NO: 1254 - DNA, 20 bp, Artificial Sequence
  Synthetic polynucleotide
ccatatcactttcgtagttt

SEQ ID NO: 1255 - DNA, 20 bp, Artificial Sequence
  Synthetic polynucleotide
cttgttctgttggtctttct

SEQ ID NO: 1256 - DNA, 20 bp, Artificial Sequence
  Synthetic polynucleotide
taatagctgcgtggtaaatg

SEQ ID NO: 1257 - DNA, 20 bp, Artificial Sequence
  Synthetic polynucleotide
tcgaagcgtttgccggaatc

SEQ ID NO: 1258 - DNA, 20 bp, Artificial Sequence
  Synthetic polynucleotide
atcaaacagtgtttggattt

SEQ ID NO: 1259 - DNA, 20 bp, Artificial Sequence
  Synthetic polynucleotide
aaggagcgattgcggtattt

SEQ ID NO: 1260 - DNA, 20 bp, Artificial Sequence
  Synthetic polynucleotide
ggatcacattcagtggattg

SEQ ID NO: 1261 - DNA, 20 bp, Artificial Sequence
  Synthetic polynucleotide
atttagctcgtgtatagata

SEQ ID NO: 1262 - DNA, 20 bp, Artificial Sequence
  Synthetic polynucleotide
attacgcgatttatgggtgt

SEQ ID NO: 1263 - DNA, 20 bp, Artificial Sequence
  Synthetic polynucleotide
catacacccgatccaggaac

SEQ ID NO: 1264 - DNA, 20 bp, Artificial Sequence
  Synthetic polynucleotide
tgttatcgatgcgatcacga

SEQ ID NO: 1265 - DNA, 20 bp, Artificial Sequence
  Synthetic polynucleotide
aatagactatcaggcatcat

SEQ ID NO: 1266 - DNA, 20 bp, Artificial Sequence
  Synthetic polynucleotide
taatgacttgaagacaagac

SEQ ID NO: 1267 - DNA, 20 bp, Artificial Sequence
  Synthetic polynucleotide
aaattccattaggtcaccac

SEQ ID NO: 1268 - DNA, 20 bp, Artificial Sequence
  Synthetic polynucleotide
taagcgctcaagatgaatga

SEQ ID NO: 1269 - DNA, 20 bp, Artificial Sequence
  Synthetic polynucleotide
tctttgcactttggttagtt

SEQ ID NO: 1270 - DNA, 20 bp, Artificial Sequence
  Synthetic polynucleotide
gtggtacgtatgggataaat

SEQ ID NO: 1271 - DNA, 20 bp, Artificial Sequence
  Synthetic polynucleotide
atctctccttgtgggcttca

SEQ ID NO: 1272 - DNA, 20 bp, Artificial Sequence
  Synthetic polynucleotide
atctcactgctatttagtta

SEQ ID NO: 1273 - DNA, 20 bp, Artificial Sequence
  Synthetic polynucleotide
agtggtccattcgggtattc

SEQ ID NO: 1274 - DNA, 20 bp, Artificial Sequence
  Synthetic polynucleotide
tacaggcatcctccttgtct

SEQ ID NO: 1275 - DNA, 20 bp, Artificial Sequence
  Synthetic polynucleotide
attatgcgtagcacgagata

SEQ ID NO: 1276 - DNA, 20 bp, Artificial Sequence
  Synthetic polynucleotide
tagagacccatgtcaggcca

SEQ ID NO: 1277 - DNA, 20 bp, Artificial Sequence
  Synthetic polynucleotide
atggggctaggtaagcagct

SEQ ID NO: 1278 - DNA, 20 bp, Artificial Sequence
  Synthetic polynucleotide
tgaacgcgttccggcagacc

SEQ ID NO: 1279 - DNA, 20 bp, Artificial Sequence
  Synthetic polynucleotide
cttcatccaagggtagagac

SEQ ID NO: 1280 - DNA, 20 bp, Artificial Sequence
  Synthetic polynucleotide
gaaaagccttaaacggccaa

SEQ ID NO: 1281 - DNA, 20 bp, Artificial Sequence
  Synthetic polynucleotide
gaagtaccgatattgctcgc

SEQ ID NO: 1282 - DNA, 20 bp, Artificial Sequence
  Synthetic polynucleotide
atagtccgaaacctgacacc

SEQ ID NO: 1283 - DNA, 20 bp, Artificial Sequence
  Synthetic polynucleotide
aaagcgcaggaccttaccgc

SEQ ID NO: 1284 - DNA, 20 bp, Artificial Sequence
  Synthetic polynucleotide
acaattccgggcgtaatttc

SEQ ID NO: 1285 - DNA, 20 bp, Artificial Sequence
  Synthetic polynucleotide
ataagtccgttagggtttaa

SEQ ID NO: 1286 - DNA, 20 bp, Artificial Sequence
  Synthetic polynucleotide
gtcactctatccgggtttaa

SEQ ID NO: 1287 - DNA, 20 bp, Artificial Sequence
  Synthetic polynucleotide
tgcatccttgacgcatacct

SEQ ID NO: 1288 - DNA, 20 bp, Artificial Sequence
  Synthetic polynucleotide
aaatttcagccggaacaaac

SEQ ID NO: 1289 - DNA, 20 bp, Artificial Sequence
  Synthetic polynucleotide
caaaagcgtgcttctgatct

SEQ ID NO: 1290 - DNA, 20 bp, Artificial Sequence
  Synthetic polynucleotide
acagggcatcataggtgcct

SEQ ID NO: 1291 - DNA, 20 bp, Artificial Sequence
  Synthetic polynucleotide
ttatgccgactttgcagttg

SEQ ID NO: 1292 - DNA, 20 bp, Artificial Sequence
  Synthetic polynucleotide
ctgtcccaactttcgtggcg

SEQ ID NO: 1293 - DNA, 20 bp, Artificial Sequence
  Synthetic polynucleotide
agttgtcgtagtgggcgcga

SEQ ID NO: 1294 - DNA, 20 bp, Artificial Sequence
  Synthetic polynucleotide
tataagcgcgtaggcaatgg

SEQ ID NO: 1295 - DNA, 20 bp, Artificial Sequence
  Synthetic polynucleotide
ggagttcctcttaccggatc

SEQ ID NO: 1296 - DNA, 20 bp, Artificial Sequence
  Synthetic polynucleotide
cacctaccagacctcaactc

SEQ ID NO: 1297 - DNA, 20 bp, Artificial Sequence
  Synthetic polynucleotide
gcggtcccgtaaaacagaac

SEQ ID NO: 1298 - DNA, 20 bp, Artificial Sequence
  Synthetic polynucleotide
agtaaacatctatgcggagg

SEQ ID NO: 1299 - DNA, 20 bp, Artificial Sequence
  Synthetic polynucleotide
caggacctggcgcttattct

SEQ ID NO: 1300 - DNA, 20 bp, Artificial Sequence
  Synthetic polynucleotide
tcgacactcatggcctttcc

SEQ ID NO: 1301 - DNA, 20 bp, Artificial Sequence
  Synthetic polynucleotide
aatccccgcactggacttct

SEQ ID NO: 1302 - DNA, 20 bp, Artificial Sequence
  Synthetic polynucleotide
cgcgtccaggaggcagttta

SEQ ID NO: 1303 - DNA, 20 bp, Artificial Sequence
  Synthetic polynucleotide
ggcgccccgtcgctacttac

SEQ ID NO: 1304 - DNA, 20 bp, Artificial Sequence
  Synthetic polynucleotide
ccgcgacgcggtccggcgtt

SEQ ID NO: 1305 - DNA, 20 bp, Artificial Sequence
  Synthetic polynucleotide
ctactccatcactgggactt

SEQ ID NO: 1306 - DNA, 20 bp, Artificial Sequence
  Synthetic polynucleotide
cggctccggcgacacgagac

SEQ ID NO: 1307 - DNA, 20 bp, Artificial Sequence
  Synthetic polynucleotide
ttcgcccgttaacggggcaa

SEQ ID NO: 1308 - DNA, 20 bp, Artificial Sequence
  Synthetic polynucleotide
ttcggccccggtacaacgta

SEQ ID NO: 1309 - DNA, 20 bp, Artificial Sequence
  Synthetic polynucleotide
gtccggcggaagcggacgac

SEQ ID NO: 1310 - DNA, 20 bp, Artificial Sequence
  Synthetic polynucleotide
ggccgtctcccttgacgaga

SEQ ID NO: 1311 - DNA, 20 bp, Artificial Sequence
  Synthetic polynucleotide
ttcatcccaactgtccgggc

SEQ ID NO: 1312 - DNA, 20 bp, Artificial Sequence
  Synthetic polynucleotide
gatctgccaggctctccagg

SEQ ID NO: 1313 - DNA, 20 bp, Artificial Sequence
  Synthetic polynucleotide
agacacctcttctgcagcgc

SEQ ID NO: 1314 - DNA, 20 bp, Artificial Sequence
  Synthetic polynucleotide
aatctacaaaaataataaat

SEQ ID NO: 1315 - DNA, 20 bp, Artificial Sequence
  Synthetic polynucleotide
cagggactatttgctattta

SEQ ID NO: 1316 - DNA, 20 bp, Artificial Sequence
  Synthetic polynucleotide
ttacctcgtttctataattt

SEQ ID NO: 1317 - DNA, 20 bp, Artificial Sequence
  Synthetic polynucleotide
ccggtgcaaatagggaataa

SEQ ID NO: 1318 - DNA, 20 bp, Artificial Sequence
  Synthetic polynucleotide
gtaatcctaatggggatatt

SEQ ID NO: 1319 - DNA, 20 bp, Artificial Sequence
  Synthetic polynucleotide
gaaatgccttaaattgaatg

SEQ ID NO: 1320 - DNA, 20 bp, Artificial Sequence
  Synthetic polynucleotide
aaattgctaatttcaggaca

SEQ ID NO: 1321 - DNA, 20 bp, Artificial Sequence
  Synthetic polynucleotide
gaaagtcagagtagacatag

SEQ ID NO: 1322 - DNA, 20 bp, Artificial Sequence
  Synthetic polynucleotide
gttcacctggtaaagggtta

SEQ ID NO: 1323 - DNA, 20 bp, Artificial Sequence
  Synthetic polynucleotide
tacaagctagtataaaggaa

SEQ ID NO: 1324 - DNA, 20 bp, Artificial Sequence
  Synthetic polynucleotide
gtgctactgatcgggtagga

SEQ ID NO: 1325 - DNA, 20 bp, Artificial Sequence
  Synthetic polynucleotide
ttcacacacgtttataacca

SEQ ID NO: 1326 - DNA, 20 bp, Artificial Sequence
  Synthetic polynucleotide
ataaatcctatgaacaacaa

SEQ ID NO: 1327 - DNA, 20 bp, Artificial Sequence
  Synthetic polynucleotide
tttaaccgttagaacgacga

SEQ ID NO: 1328 - DNA, 20 bp, Artificial Sequence
  Synthetic polynucleotide
tttggccatgatagatctga

SEQ ID NO: 1329 - DNA, 20 bp, Artificial Sequence
  Synthetic polynucleotide
agttggctggtttgtcttct

SEQ ID NO: 1330 - DNA, 20 bp, Artificial Sequence
  Synthetic polynucleotide
caattgctattgcgtcttct

SEQ ID NO: 1331 - DNA, 20 bp, Artificial Sequence
  Synthetic polynucleotide
gtaattcgggtttggtatct

SEQ ID NO: 1332 - DNA, 20 bp, Artificial Sequence
  Synthetic polynucleotide
ttaaaccagttggtaatttg

SEQ ID NO: 1333 - DNA, 20 bp, Artificial Sequence
  Synthetic polynucleotide
agtggtctctcctatgattg

SEQ ID NO: 1334 - DNA, 20 bp, Artificial Sequence
  Synthetic polynucleotide
cgttctctaatgtctgattc

SEQ ID NO: 1335 - DNA, 20 bp, Artificial Sequence
  Synthetic polynucleotide
ataatgcacttgggaggaat

SEQ ID NO: 1336 - DNA, 20 bp, Artificial Sequence
  Synthetic polynucleotide
aacacgcaggggactcataa

SEQ ID NO: 1337 - DNA, 20 bp, Artificial Sequence
  Synthetic polynucleotide
aaagttctctggctagactg

SEQ ID NO: 1338 - DNA, 20 bp, Artificial Sequence
  Synthetic polynucleotide
caggttctagtttatggtgg

SEQ ID NO: 1339 - DNA, 20 bp, Artificial Sequence
  Synthetic polynucleotide
catacacgctctgggatggt

SEQ ID NO: 1340 - DNA, 20 bp, Artificial Sequence
  Synthetic polynucleotide
aaagtacaatgtaacgcaag

SEQ ID NO: 1341 - DNA, 20 bp, Artificial Sequence
  Synthetic polynucleotide
taggagctcaatagaaccat

SEQ ID NO: 1342 - DNA, 20 bp, Artificial Sequence
  Synthetic polynucleotide
accaatcagaccaacacgac

SEQ ID NO: 1343 - DNA, 20 bp, Artificial Sequence
  Synthetic polynucleotide
gaaacacaggagagacagac

SEQ ID NO: 1344 - DNA, 20 bp, Artificial Sequence
  Synthetic polynucleotide
gcaattccgttgcatggttt

SEQ ID NO: 1345 - DNA, 20 bp, Artificial Sequence
  Synthetic polynucleotide
aatgggcctttacattcttt

SEQ ID NO: 1346 - DNA, 20 bp, Artificial Sequence
  Synthetic polynucleotide
ggaatacaacgggaaattat

SEQ ID NO: 1347 - DNA, 20 bp, Artificial Sequence
  Synthetic polynucleotide
aaataactgcgttgggactg

SEQ ID NO: 1348 - DNA, 20 bp, Artificial Sequence
  Synthetic polynucleotide
ggctgtcatttggcagctat

SEQ ID NO: 1349 - DNA, 20 bp, Artificial Sequence
  Synthetic polynucleotide
tccgagcggttgtgttggtt

SEQ ID NO: 1350 - DNA, 20 bp, Artificial Sequence
  Synthetic polynucleotide
tctgggcccagatggttgtt

SEQ ID NO: 1351 - DNA, 20 bp, Artificial Sequence
  Synthetic polynucleotide
ttcttgcccgtaaaagggct

SEQ ID NO: 1352 - DNA, 20 bp, Artificial Sequence
  Synthetic polynucleotide
taagtactggtttgggactc

SEQ ID NO: 1353 - DNA, 20 bp, Artificial Sequence
  Synthetic polynucleotide
aagacccgatatgtagagaa

SEQ ID NO: 1354 - DNA, 20 bp, Artificial Sequence
  Synthetic polynucleotide
gcgggacaaccttaatgaac

SEQ ID NO: 1355 - DNA, 20 bp, Artificial Sequence
  Synthetic polynucleotide
atatcgcaaagcttagggtg

SEQ ID NO: 1356 - DNA, 20 bp, Artificial Sequence
  Synthetic polynucleotide
aatactcgctactcgtacac

SEQ ID NO: 1357 - DNA, 20 bp, Artificial Sequence
  Synthetic polynucleotide
gagtgccctaagatgtgatg

SEQ ID NO: 1358 - DNA, 20 bp, Artificial Sequence
  Synthetic polynucleotide
ttggctctaaaaggcaccaa

SEQ ID NO: 1359 - DNA, 20 bp, Artificial Sequence
  Synthetic polynucleotide
tgctctcgtccccgtaaaac

SEQ ID NO: 1360 - DNA, 20 bp, Artificial Sequence
  Synthetic polynucleotide
gtcgctcacccggcttaaat

SEQ ID NO: 1361 - DNA, 20 bp, Artificial Sequence
  Synthetic polynucleotide
gtccctcgcatgtcctttct

SEQ ID NO: 1362 - DNA, 20 bp, Artificial Sequence
  Synthetic polynucleotide
aatccccggtggcaatcttg

SEQ ID NO: 1363 - DNA, 20 bp, Artificial Sequence
  Synthetic polynucleotide
ccgctgcgccaagttgaatg

SEQ ID NO: 1364 - DNA, 20 bp, Artificial Sequence
  Synthetic polynucleotide
tgtcttcgtactggcttccg

SEQ ID NO: 1365 - DNA, 20 bp, Artificial Sequence
  Synthetic polynucleotide
ttgtatctacgggtagcctt

SEQ ID NO: 1366 - DNA, 20 bp, Artificial Sequence
  Synthetic polynucleotide
gacgctcaaatgggtactcg

SEQ ID NO: 1367 - DNA, 20 bp, Artificial Sequence
  Synthetic polynucleotide
ctatcacggcggaaacatta

SEQ ID NO: 1368 - DNA, 20 bp, Artificial Sequence
  Synthetic polynucleotide
agaacacactagtggctgtt

SEQ ID NO: 1369 - DNA, 20 bp, Artificial Sequence
  Synthetic polynucleotide
ctggagctaatatctgaggc

SEQ ID NO: 1370 - DNA, 20 bp, Artificial Sequence
  Synthetic polynucleotide
acggagccctcgtaggacga

SEQ ID NO: 1371 - DNA, 20 bp, Artificial Sequence
  Synthetic polynucleotide
agtctgcataggataggtgc

SEQ ID NO: 1372 - DNA, 20 bp, Artificial Sequence
  Synthetic polynucleotide
gcaccccactgattgaccac

SEQ ID NO: 1373 - DNA, 20 bp, Artificial Sequence
  Synthetic polynucleotide
ggatcaccgagattcgagga

SEQ ID NO: 1374 - DNA, 20 bp, Artificial Sequence
  Synthetic polynucleotide
gctgagctgggcacacattt

SEQ ID NO: 1375 - DNA, 20 bp, Artificial Sequence
  Synthetic polynucleotide
gcactgcgactgctggaatt

SEQ ID NO: 1376 - DNA, 20 bp, Artificial Sequence
  Synthetic polynucleotide
ccagcactgctagcgtttct

SEQ ID NO: 1377 - DNA, 20 bp, Artificial Sequence
  Synthetic polynucleotide
agctggcacacggcctctat

SEQ ID NO: 1378 - DNA, 20 bp, Artificial Sequence
  Synthetic polynucleotide
cagctgccgtgctcatgcct

SEQ ID NO: 1379 - DNA, 20 bp, Artificial Sequence
  Synthetic polynucleotide
cttggccagccacgcgaact

SEQ ID NO: 1380 - DNA, 20 bp, Artificial Sequence
  Synthetic polynucleotide
tattaccgcgcgcggacaca

SEQ ID NO: 1381 - DNA, 20 bp, Artificial Sequence
  Synthetic polynucleotide
cacgaccccacacgacgtcg

SEQ ID NO: 1382 - DNA, 20 bp, Artificial Sequence
  Synthetic polynucleotide
gacctcccttgcggtggagt

SEQ ID NO: 1383 - DNA, 20 bp, Artificial Sequence
  Synthetic polynucleotide
cccgttcggagtgccctagt

SEQ ID NO: 1384 - DNA, 20 bp, Artificial Sequence
  Synthetic polynucleotide
cccatacctgagcgacggag

SEQ ID NO: 1385 - DNA, 20 bp, Artificial Sequence
  Synthetic polynucleotide
tcgagccacaagcgtgactg

SEQ ID NO: 1386 - DNA, 20 bp, Artificial Sequence
  Synthetic polynucleotide
ctggtacttagcatgaaagc

SEQ ID NO: 1387 - DNA, 20 bp, Artificial Sequence
  Synthetic polynucleotide
actccgcaagacctatgaga

SEQ ID NO: 1388 - DNA, 20 bp, Artificial Sequence
  Synthetic polynucleotide
cggtcccacgatagccaggt

SEQ ID NO: 1389 - DNA, 20 bp, Artificial Sequence
  Synthetic polynucleotide
aaacgtcttagtagttattt

SEQ ID NO: 1390 - DNA, 20 bp, Artificial Sequence
  Synthetic polynucleotide
tggcttctgagtgtttaatt

SEQ ID NO: 1391 - DNA, 20 bp, Artificial Sequence
  Synthetic polynucleotide
gtataaccaattatttaatt

SEQ ID NO: 1392 - DNA, 20 bp, Artificial Sequence
  Synthetic polynucleotide
taggatcttatacgattatc

SEQ ID NO: 1393 - DNA, 20 bp, Artificial Sequence
  Synthetic polynucleotide
cgagttcaaggagttaatag

SEQ ID NO: 1394 - DNA, 20 bp, Artificial Sequence
  Synthetic polynucleotide
agattgccaaaagaatataa

SEQ ID NO: 1395 - DNA, 20 bp, Artificial Sequence
  Synthetic polynucleotide
ttcagtcggtttgatcgtat

SEQ ID NO: 1396 - DNA, 20 bp, Artificial Sequence
  Synthetic polynucleotide
atagttcaaatgtaatgttg

SEQ ID NO: 1397 - DNA, 20 bp, Artificial Sequence
  Synthetic polynucleotide
taagtgcgccactaaaataa

SEQ ID NO: 1398 - DNA, 20 bp, Artificial Sequence
  Synthetic polynucleotide
agatgaccctatataaacaa

SEQ ID NO: 1399 - DNA, 20 bp, Artificial Sequence
  Synthetic polynucleotide
aagaaactacctcaagtaaa

SEQ ID NO: 1400 - DNA, 20 bp, Artificial Sequence
  Synthetic polynucleotide
aggtcacgggagttgtgaga

SEQ ID NO: 1401 - DNA, 20 bp, Artificial Sequence
  Synthetic polynucleotide
atgaaacggaactgatgtgt

SEQ ID NO: 1402 - DNA, 20 bp, Artificial Sequence
  Synthetic polynucleotide
atgagccatgacaaaaccaa

SEQ ID NO: 1403 - DNA, 20 bp, Artificial Sequence
  Synthetic polynucleotide
cagtaccaagttaaaaacaa

SEQ ID NO: 1404 - DNA, 20 bp, Artificial Sequence
  Synthetic polynucleotide
tcatggccgttataattatt

SEQ ID NO: 1405 - DNA, 20 bp, Artificial Sequence
  Synthetic polynucleotide
tcattgccatcaaaataaat

SEQ ID NO: 1406 - DNA, 20 bp, Artificial Sequence
  Synthetic polynucleotide
tgtcatcgttgtcgttattt

SEQ ID NO: 1407 - DNA, 20 bp, Artificial Sequence
  Synthetic polynucleotide
taaggcctgttgaagattta

SEQ ID NO: 1408 - DNA, 20 bp, Artificial Sequence
  Synthetic polynucleotide
acaaaccgagggctataatc

SEQ ID NO: 1409 - DNA, 20 bp, Artificial Sequence
  Synthetic polynucleotide
gatgatctcggggagatatt

SEQ ID NO: 1410 - DNA, 20 bp, Artificial Sequence
  Synthetic polynucleotide
ctacgtcctaaaatcaaaaa

SEQ ID NO: 1411 - DNA, 20 bp, Artificial Sequence
  Synthetic polynucleotide
aactaactggagggagtact

SEQ ID NO: 1412 - DNA, 20 bp, Artificial Sequence
  Synthetic polynucleotide
aatttcctgcacccaaaaaa

SEQ ID NO: 1413 - DNA, 20 bp, Artificial Sequence
  Synthetic polynucleotide
gtttccctgaactcgtatga

SEQ ID NO: 1414 - DNA, 20 bp, Artificial Sequence
  Synthetic polynucleotide
ggtttacgatagcccgtact

SEQ ID NO: 1415 - DNA, 20 bp, Artificial Sequence
  Synthetic polynucleotide
ttgctgctagtgatcaggct

SEQ ID NO: 1416 - DNA, 20 bp, Artificial Sequence
  Synthetic polynucleotide
agatcacaaagaaagtcagg

SEQ ID NO: 1417 - DNA, 20 bp, Artificial Sequence
  Synthetic polynucleotide
tacgcactagtacaattggt

SEQ ID NO: 1418 - DNA, 20 bp, Artificial Sequence
  Synthetic polynucleotide
agtactcagagctacggaac

SEQ ID NO: 1419 - DNA, 20 bp, Artificial Sequence
  Synthetic polynucleotide
accaaacctcttgctattta

SEQ ID NO: 1420 - DNA, 20 bp, Artificial Sequence
  Synthetic polynucleotide
atcctacgcagggagtttct

SEQ ID NO: 1421 - DNA, 20 bp, Artificial Sequence
  Synthetic polynucleotide
cacttcctcttagaccttct

SEQ ID NO: 1422 - DNA, 20 bp, Artificial Sequence
  Synthetic polynucleotide
aacgctctaggaaaataaaa

SEQ ID NO: 1423 - DNA, 20 bp, Artificial Sequence
  Synthetic polynucleotide
attccgcacactgcaattcc

SEQ ID NO: 1424 - DNA, 20 bp, Artificial Sequence
  Synthetic polynucleotide
tacgctctggtttatgcttg

SEQ ID NO: 1425 - DNA, 20 bp, Artificial Sequence
  Synthetic polynucleotide
ttggttctattgtctgctgt

SEQ ID NO: 1426 - DNA, 20 bp, Artificial Sequence
  Synthetic polynucleotide
aaaagacttgcgcgctgctc

SEQ ID NO: 1427 - DNA, 20 bp, Artificial Sequence
  Synthetic polynucleotide
tctacactgatgctggtcgt

SEQ ID NO: 1428 - DNA, 20 bp, Artificial Sequence
  Synthetic polynucleotide
ggagaactcaagcatgacat

SEQ ID NO: 1429 - DNA, 20 bp, Artificial Sequence
  Synthetic polynucleotide
caagtgcgttaaggatcggt

SEQ ID NO: 1430 - DNA, 20 bp, Artificial Sequence
  Synthetic polynucleotide
attacacctcctacggtaac

SEQ ID NO: 1431 - DNA, 20 bp, Artificial Sequence
  Synthetic polynucleotide
gagtgccagagacacggtgg

SEQ ID NO: 1432 - DNA, 20 bp, Artificial Sequence
  Synthetic polynucleotide
gatgaccgagtctacggtgc

SEQ ID NO: 1433 - DNA, 20 bp, Artificial Sequence
  Synthetic polynucleotide
ctgaagcactaaggttcagc

SEQ ID NO: 1434 - DNA, 20 bp, Artificial Sequence
  Synthetic polynucleotide
aaatagcgtcccttatttcc

SEQ ID NO: 1435 - DNA, 20 bp, Artificial Sequence
  Synthetic polynucleotide
agtgggcggggagtgcctct

SEQ ID NO: 1436 - DNA, 20 bp, Artificial Sequence
  Synthetic polynucleotide
ttcagtcgtatgtggtaatt

SEQ ID NO: 1437 - DNA, 20 bp, Artificial Sequence
  Synthetic polynucleotide
ccaatgcgtttggccgggtg

SEQ ID NO: 1438 - DNA, 20 bp, Artificial Sequence
  Synthetic polynucleotide
gttctgcatgtatggccttt

SEQ ID NO: 1439 - DNA, 20 bp, Artificial Sequence
  Synthetic polynucleotide
ctcgaccgcttcaggtgttt

SEQ ID NO: 1440 - DNA, 20 bp, Artificial Sequence
  Synthetic polynucleotide
catgttcaccgttcgggcca

SEQ ID NO: 1441 - DNA, 20 bp, Artificial Sequence
  Synthetic polynucleotide
tcacggccggccaactacca

SEQ ID NO: 1442 - DNA, 20 bp, Artificial Sequence
  Synthetic polynucleotide
agggcacctgggccattgtc

SEQ ID NO: 1443 - DNA, 20 bp, Artificial Sequence
  Synthetic polynucleotide
cagacccatccggagcagtg

SEQ ID NO: 1444 - DNA, 20 bp, Artificial Sequence
  Synthetic polynucleotide
accacccgaccgcacttcga

SEQ ID NO: 1445 - DNA, 20 bp, Artificial Sequence
  Synthetic polynucleotide
tgagggcatgatatggacac

SEQ ID NO: 1446 - DNA, 20 bp, Artificial Sequence
  Synthetic polynucleotide
agataaccgtggataaaggc

SEQ ID NO: 1447 - DNA, 20 bp, Artificial Sequence
  Synthetic polynucleotide
aaattgctgatgaccctggc

SEQ ID NO: 1448 - DNA, 20 bp, Artificial Sequence
  Synthetic polynucleotide
caaacacggttacggacgag

SEQ ID NO: 1449 - DNA, 20 bp, Artificial Sequence
  Synthetic polynucleotide
gcgcgacagcctatgcttct

SEQ ID NO: 1450 - DNA, 20 bp, Artificial Sequence
  Synthetic polynucleotide
ggagtccgggacccctttca

SEQ ID NO: 1451 - DNA, 20 bp, Artificial Sequence
  Synthetic polynucleotide
taaacgcgctccagtatttc

SEQ ID NO: 1452 - DNA, 20 bp, Artificial Sequence
  Synthetic polynucleotide
ccacttcccattggtttgtc

SEQ ID NO: 1453 - DNA, 20 bp, Artificial Sequence
  Synthetic polynucleotide
cacgtccatgcttggcacct

SEQ ID NO: 1454 - DNA, 20 bp, Artificial Sequence
  Synthetic polynucleotide
cctagtcagcacggttaacg

SEQ ID NO: 1455 - DNA, 20 bp, Artificial Sequence
  Synthetic polynucleotide
agctcacacgctgctaccgg

SEQ ID NO: 1456 - DNA, 20 bp, Artificial Sequence
  Synthetic polynucleotide
ccacagcgttggtgtccccg

SEQ ID NO: 1457 - DNA, 20 bp, Artificial Sequence
  Synthetic polynucleotide
gactacctacggagggataa

SEQ ID NO: 1458 - DNA, 20 bp, Artificial Sequence
  Synthetic polynucleotide
cgccgcccccggtacccgag

SEQ ID NO: 1459 - DNA, 20 bp, Artificial Sequence
  Synthetic polynucleotide
tgtgcgcgttactggaaggg

SEQ ID NO: 1460 - DNA, 20 bp, Artificial Sequence
  Synthetic polynucleotide
gccgcgcgattcttaccagc

SEQ ID NO: 1461 - DNA, 20 bp, Artificial Sequence
  Synthetic polynucleotide
ctattccggaggaacagggt

SEQ ID NO: 1462 - DNA, 20 bp, Artificial Sequence
  Synthetic polynucleotide
caagcgctgtgtatgaacgc

SEQ ID NO: 1463 - DNA, 20 bp, Artificial Sequence
  Synthetic polynucleotide
taaaccctaggcctcgacac

SEQ ID NO: 1464 - DNA, 20 bp, Artificial Sequence
  Synthetic polynucleotide
tactagcttattcttaattt

SEQ ID NO: 1465 - DNA, 20 bp, Artificial Sequence
  Synthetic polynucleotide
tctgacctattaattatttc

SEQ ID NO: 1466 - DNA, 20 bp, Artificial Sequence
  Synthetic polynucleotide
gattctccacaaaagtttct

SEQ ID NO: 1467 - DNA, 20 bp, Artificial Sequence
  Synthetic polynucleotide
atcattcctttgtcatgatt

SEQ ID NO: 1468 - DNA, 20 bp, Artificial Sequence
  Synthetic polynucleotide
cttaatccactatattaaac

SEQ ID NO: 1469 - DNA, 20 bp, Artificial Sequence
  Synthetic polynucleotide
aatttgcattggtttcaatt

SEQ ID NO: 1470 - DNA, 20 bp, Artificial Sequence
  Synthetic polynucleotide
atattacgaaagtgaagaat

SEQ ID NO: 1471 - DNA, 20 bp, Artificial Sequence
  Synthetic polynucleotide
aaaaatcacaagtaaaatac

SEQ ID NO: 1472 - DNA, 20 bp, Artificial Sequence
  Synthetic polynucleotide
caacttcttctttctctgtt

SEQ ID NO: 1473 - DNA, 20 bp, Artificial Sequence
  Synthetic polynucleotide
taaagacggaacatatgaaa

SEQ ID NO: 1474 - DNA, 20 bp, Artificial Sequence
  Synthetic polynucleotide
taagagctataaaaaatggt

SEQ ID NO: 1475 - DNA, 20 bp, Artificial Sequence
  Synthetic polynucleotide
gagtatcagatattaatcat

SEQ ID NO: 1476 - DNA, 20 bp, Artificial Sequence
  Synthetic polynucleotide
cagcggcaagataacaacat

SEQ ID NO: 1477 - DNA, 20 bp, Artificial Sequence
  Synthetic polynucleotide
caatgccaatagagatgtga

SEQ ID NO: 1478 - DNA, 20 bp, Artificial Sequence
  Synthetic polynucleotide
gaatcacagaaggacgaagc

SEQ ID NO: 1479 - DNA, 20 bp, Artificial Sequence
  Synthetic polynucleotide
tgttccctcttactattcct

SEQ ID NO: 1480 - DNA, 20 bp, Artificial Sequence
  Synthetic polynucleotide
ttaattctctgacccttatt

SEQ ID NO: 1481 - DNA, 20 bp, Artificial Sequence
  Synthetic polynucleotide
gagtcgctatttggataatt

SEQ ID NO: 1482 - DNA, 20 bp, Artificial Sequence
  Synthetic polynucleotide
tctaagctcaaacaaaattc

SEQ ID NO: 1483 - DNA, 20 bp, Artificial Sequence
  Synthetic polynucleotide
attcggcatttgtcattgtt

SEQ ID NO: 1484 - DNA, 20 bp, Artificial Sequence
  Synthetic polynucleotide
gccatgcgatcaatttagct

SEQ ID NO: 1485 - DNA, 20 bp, Artificial Sequence
  Synthetic polynucleotide
atgttccgaccagcttcctc

SEQ ID NO: 1486 - DNA, 20 bp, Artificial Sequence
  Synthetic polynucleotide
aggattctccattgatgatt

SEQ ID NO: 1487 - DNA, 20 bp, Artificial Sequence
  Synthetic polynucleotide
tgggtaccaaaagcaagaaa

SEQ ID NO: 1488 - DNA, 20 bp, Artificial Sequence
  Synthetic polynucleotide
aatcaacgatggtatcgaag

SEQ ID NO: 1489 - DNA, 20 bp, Artificial Sequence
  Synthetic polynucleotide
gctgttctcggtataatcgt

SEQ ID NO: 1490 - DNA, 20 bp, Artificial Sequence
  Synthetic polynucleotide
accatactactggtaaccaa

SEQ ID NO: 1491 - DNA, 20 bp, Artificial Sequence
  Synthetic polynucleotide
taggagccatggtagtacgc

SEQ ID NO: 1492 - DNA, 20 bp, Artificial Sequence
  Synthetic polynucleotide
cacgatcccatctacaacgc

SEQ ID NO: 1493 - DNA, 20 bp, Artificial Sequence
  Synthetic polynucleotide
atgtgtcaacggaaacgtga

SEQ ID NO: 1494 - DNA, 20 bp, Artificial Sequence
  Synthetic polynucleotide
ataccgccctgttcctttca

SEQ ID NO: 1495 - DNA, 20 bp, Artificial Sequence
  Synthetic polynucleotide
atgccacgccatatataatt

SEQ ID NO: 1496 - DNA, 20 bp, Artificial Sequence
  Synthetic polynucleotide
atggatctgtgagtgttact

SEQ ID NO: 1497 - DNA, 20 bp, Artificial Sequence
  Synthetic polynucleotide
taggacctctcatgttatcg

SEQ ID NO: 1498 - DNA, 20 bp, Artificial Sequence
  Synthetic polynucleotide
gttaagcttgtggaaataaa

SEQ ID NO: 1499 - DNA, 20 bp, Artificial Sequence
  Synthetic polynucleotide
attaaccaagtggtaaatta

SEQ ID NO: 1500 - DNA, 20 bp, Artificial Sequence
  Synthetic polynucleotide
ggatggctgcaagagtgtca

SEQ ID NO: 1501 - DNA, 20 bp, Artificial Sequence
  Synthetic polynucleotide
cagggcctactcaacgaaat

SEQ ID NO: 1502 - DNA, 20 bp, Artificial Sequence
  Synthetic polynucleotide
acccgtcacgcgggcgatta

SEQ ID NO: 1503 - DNA, 20 bp, Artificial Sequence
  Synthetic polynucleotide
gttgctccagggagcgatat

SEQ ID NO: 1504 - DNA, 20 bp, Artificial Sequence
  Synthetic polynucleotide
gggtacccattaccatgatc

SEQ ID NO: 1505 - DNA, 20 bp, Artificial Sequence
  Synthetic polynucleotide
tagggacgatctgttgtaag

SEQ ID NO: 1506 - DNA, 20 bp, Artificial Sequence
  Synthetic polynucleotide
tataggcaacaaaccgacac

SEQ ID NO: 1507 - DNA, 20 bp, Artificial Sequence
  Synthetic polynucleotide
gagagacccgaataacccgt

SEQ ID NO: 1508 - DNA, 20 bp, Artificial Sequence
  Synthetic polynucleotide
ccgggtcagttgaaaaacgg

SEQ ID NO: 1509 - DNA, 20 bp, Artificial Sequence
  Synthetic polynucleotide
ggtttgcgctcaaatagttt

SEQ ID NO: 1510 - DNA, 20 bp, Artificial Sequence
  Synthetic polynucleotide
ccctaccccttggctttctc

SEQ ID NO: 1511 - DNA, 20 bp, Artificial Sequence
  Synthetic polynucleotide
tcgtacccgtaacgccttct

SEQ ID NO: 1512 - DNA, 20 bp, Artificial Sequence
  Synthetic polynucleotide
tttgaccgaaccagaattaa

SEQ ID NO: 1513 - DNA, 20 bp, Artificial Sequence
  Synthetic polynucleotide
agccctcctgattgagatct

SEQ ID NO: 1514 - DNA, 20 bp, Artificial Sequence
  Synthetic polynucleotide
aaacggccccgaggcattat

SEQ ID NO: 1515 - DNA, 20 bp, Artificial Sequence
  Synthetic polynucleotide
agaatgccgcctccatctta

SEQ ID NO: 1516 - DNA, 20 bp, Artificial Sequence
  Synthetic polynucleotide
gttcgtcactacagctccct

SEQ ID NO: 1517 - DNA, 20 bp, Artificial Sequence
  Synthetic polynucleotide
accggtcgcaggctcgagtt

SEQ ID NO: 1518 - DNA, 20 bp, Artificial Sequence
  Synthetic polynucleotide
acctatcgcctccacgtgaa

SEQ ID NO: 1519 - DNA, 20 bp, Artificial Sequence
  Synthetic polynucleotide
agccgtcagaaggtttccac

SEQ ID NO: 1520 - DNA, 20 bp, Artificial Sequence
  Synthetic polynucleotide
tactggcttagagagtcaaa

SEQ ID NO: 1521 - DNA, 20 bp, Artificial Sequence
  Synthetic polynucleotide
gtcggccgaaactgacaggt

SEQ ID NO: 1522 - DNA, 20 bp, Artificial Sequence
  Synthetic polynucleotide
cacgctcagattcagaccaa

SEQ ID NO: 1523 - DNA, 20 bp, Artificial Sequence
  Synthetic polynucleotide
gcgactcgcaagaactgggc

SEQ ID NO: 1524 - DNA, 20 bp, Artificial Sequence
  Synthetic polynucleotide
tatgggctcccgcgtcttca

SEQ ID NO: 1525 - DNA, 20 bp, Artificial Sequence
  Synthetic polynucleotide
cggcctcggcgagagtttat

SEQ ID NO: 1526 - DNA, 20 bp, Artificial Sequence
  Synthetic polynucleotide
gccccgccgctggcggcctt

SEQ ID NO: 1527 - DNA, 20 bp, Artificial Sequence
  Synthetic polynucleotide
aaccgtccttctagtaggtt

SEQ ID NO: 1528 - DNA, 20 bp, Artificial Sequence
  Synthetic polynucleotide
gcgatgccgttccgcctact

SEQ ID NO: 1529 - DNA, 20 bp, Artificial Sequence
  Synthetic polynucleotide
gcgcgcctcgctttgctctc

SEQ ID NO: 1530 - DNA, 20 bp, Artificial Sequence
  Synthetic polynucleotide
gtgatcctgccctcgtctac

SEQ ID NO: 1531 - DNA, 20 bp, Artificial Sequence
  Synthetic polynucleotide
gagcggcgcaccgaaagaat

SEQ ID NO: 1532 - DNA, 20 bp, Artificial Sequence
  Synthetic polynucleotide
ctaacgctgagtatgtggcg

SEQ ID NO: 1533 - DNA, 20 bp, Artificial Sequence
  Synthetic polynucleotide
gcacctcgcgctaaccaaga

SEQ ID NO: 1534 - DNA, 20 bp, Artificial Sequence
  Synthetic polynucleotide
acgatccatgcgatagctgt

SEQ ID NO: 1535 - DNA, 20 bp, Artificial Sequence
  Synthetic polynucleotide
caaccgcggctacatatgtc

SEQ ID NO: 1536 - DNA, 20 bp, Artificial Sequence
  Synthetic polynucleotide
gtgaccctctaagttgcgac

SEQ ID NO: 1537 - DNA, 20 bp, Artificial Sequence
  Synthetic polynucleotide
agcgtgcccgaaatccggga

SEQ ID NO: 1538 - DNA, 20 bp, Artificial Sequence
  Synthetic polynucleotide
ctggcccacatactcccggc

SEQ ID NO: 1539 - DNA, 20 bp, Artificial Sequence
  Synthetic polynucleotide
ataaaactatttatttaaaa

SEQ ID NO: 1540 - DNA, 20 bp, Artificial Sequence
  Synthetic polynucleotide
atttctcttacgtctaatat

SEQ ID NO: 1541 - DNA, 20 bp, Artificial Sequence
  Synthetic polynucleotide
cccattcacatactataaat

SEQ ID NO: 1542 - DNA, 20 bp, Artificial Sequence
  Synthetic polynucleotide
ctagctcatcattgttctta

SEQ ID NO: 1543 - DNA, 20 bp, Artificial Sequence
  Synthetic polynucleotide
atttagcctgtgtaaaattg

SEQ ID NO: 1544 - DNA, 20 bp, Artificial Sequence
  Synthetic polynucleotide
agaattctgttgtgaaatta

SEQ ID NO: 1545 - DNA, 20 bp, Artificial Sequence
  Synthetic polynucleotide
agtcagctagcaagaaaaac

SEQ ID NO: 1546 - DNA, 20 bp, Artificial Sequence
  Synthetic polynucleotide
gtaggactttattaataaga

SEQ ID NO: 1547 - DNA, 20 bp, Artificial Sequence
  Synthetic polynucleotide
aaaacaccacacagtcaaaa

SEQ ID NO: 1548 - DNA, 20 bp, Artificial Sequence
  Synthetic polynucleotide
gaagatcgaaatataaaccg

SEQ ID NO: 1549 - DNA, 20 bp, Artificial Sequence
  Synthetic polynucleotide
aagtcccattagaattagtc

SEQ ID NO: 1550 - DNA, 20 bp, Artificial Sequence
  Synthetic polynucleotide
tatatacactgtataatgtt

SEQ ID NO: 1551 - DNA, 20 bp, Artificial Sequence
  Synthetic polynucleotide
cacatgctgataataaagga

SEQ ID NO: 1552 - DNA, 20 bp, Artificial Sequence
  Synthetic polynucleotide
attcgtcaaaaatacctaga

SEQ ID NO: 1553 - DNA, 20 bp, Artificial Sequence
  Synthetic polynucleotide
atttgacaaaacatatcaga

SEQ ID NO: 1554 - DNA, 20 bp, Artificial Sequence
  Synthetic polynucleotide
ctctcacgtttaaagttgct

SEQ ID NO: 1555 - DNA, 20 bp, Artificial Sequence
  Synthetic polynucleotide
cctatacggttgtaatatct

SEQ ID NO: 1556 - DNA, 20 bp, Artificial Sequence
  Synthetic polynucleotide
tcgtcgcgcatgtttgttct

SEQ ID NO: 1557 - DNA, 20 bp, Artificial Sequence
  Synthetic polynucleotide
ggttagcaacaccataaatg

SEQ ID NO: 1558 - DNA, 20 bp, Artificial Sequence
  Synthetic polynucleotide
aaagaacagtcgagataaaa

SEQ ID NO: 1559 - DNA, 20 bp, Artificial Sequence
  Synthetic polynucleotide
ctgattcggagaattaaaaa

SEQ ID NO: 1560 - DNA, 20 bp, Artificial Sequence
  Synthetic polynucleotide
aggttgcacagtgttagaat

SEQ ID NO: 1561 - DNA, 20 bp, Artificial Sequence
  Synthetic polynucleotide
ggtttgccctaaatacgtta

SEQ ID NO: 1562 - DNA, 20 bp, Artificial Sequence
  Synthetic polynucleotide
ggacgactatcatccatctt

SEQ ID NO: 1563 - DNA, 20 bp, Artificial Sequence
  Synthetic polynucleotide
gggagactgacgttatcgat

SEQ ID NO: 1564 - DNA, 20 bp, Artificial Sequence
  Synthetic polynucleotide
aagagccaactcgtaatgag

SEQ ID NO: 1565 - DNA, 20 bp, Artificial Sequence
  Synthetic polynucleotide
gtgatgcatgacaatcatag

SEQ ID NO: 1566 - DNA, 20 bp, Artificial Sequence
  Synthetic polynucleotide
gaaggtccctctcactccga

SEQ ID NO: 1567 - DNA, 20 bp, Artificial Sequence
  Synthetic polynucleotide
ttgggaccagattatcatgg

SEQ ID NO: 1568 - DNA, 20 bp, Artificial Sequence
  Synthetic polynucleotide
gaagatcagtcttccagagg

SEQ ID NO: 1569 - DNA, 20 bp, Artificial Sequence
  Synthetic polynucleotide
tgggcgcttattgcctttat

SEQ ID NO: 1570 - DNA, 20 bp, Artificial Sequence
  Synthetic polynucleotide
accgcccgcgctagtattct

SEQ ID NO: 1571 - DNA, 20 bp, Artificial Sequence
  Synthetic polynucleotide
gtcttaccgttctatattta

SEQ ID NO: 1572 - DNA, 20 bp, Artificial Sequence
  Synthetic polynucleotide
aggcctcattgtacctcttt

SEQ ID NO: 1573 - DNA, 20 bp, Artificial Sequence
  Synthetic polynucleotide
tgcaaacggtgtaagattat

SEQ ID NO: 1574 - DNA, 20 bp, Artificial Sequence
  Synthetic polynucleotide
aaaaggctaaattcataaca

SEQ ID NO: 1575 - DNA, 20 bp, Artificial Sequence
  Synthetic polynucleotide
ttgtatcgcaaacaaaagag

SEQ ID NO: 1576 - DNA, 20 bp, Artificial Sequence
  Synthetic polynucleotide
atcccacgtttgatctgtta

SEQ ID NO: 1577 - DNA, 20 bp, Artificial Sequence
  Synthetic polynucleotide
tttccaccaagtagtgaatc

SEQ ID NO: 1578 - DNA, 20 bp, Artificial Sequence
  Synthetic polynucleotide
gagagaccaatctctcagag

SEQ ID NO: 1579 - DNA, 20 bp, Artificial Sequence
  Synthetic polynucleotide
tggtttcttgcaaacagccc

SEQ ID NO: 1580 - DNA, 20 bp, Artificial Sequence
  Synthetic polynucleotide
taagacctgcatcgattggg

SEQ ID NO: 1581 - DNA, 20 bp, Artificial Sequence
  Synthetic polynucleotide
aaatagctaatgggttccgc

SEQ ID NO: 1582 - DNA, 20 bp, Artificial Sequence
  Synthetic polynucleotide
gtagaacggtacgaccgagg

SEQ ID NO: 1583 - DNA, 20 bp, Artificial Sequence
  Synthetic polynucleotide
gagggtccaatgaatcgagg

SEQ ID NO: 1584 - DNA, 20 bp, Artificial Sequence
  Synthetic polynucleotide
gggtcaccctctagttatat

SEQ ID NO: 1585 - DNA, 20 bp, Artificial Sequence
  Synthetic polynucleotide
agtgggctttggccgattct

SEQ ID NO: 1586 - DNA, 20 bp, Artificial Sequence
  Synthetic polynucleotide
gcttctctgtttctctcttt

SEQ ID NO: 1587 - DNA, 20 bp, Artificial Sequence
  Synthetic polynucleotide
ggtaccctgtcagactttag

SEQ ID NO: 1588 - DNA, 20 bp, Artificial Sequence
  Synthetic polynucleotide
tggtgtcggtgttcttctta

SEQ ID NO: 1589 - DNA, 20 bp, Artificial Sequence
  Synthetic polynucleotide
atcggtctcagagatttaat

SEQ ID NO: 1590 - DNA, 20 bp, Artificial Sequence
  Synthetic polynucleotide
gcccgccgaccctgatccta

SEQ ID NO: 1591 - DNA, 20 bp, Artificial Sequence
  Synthetic polynucleotide
gtatcactcgataatcgttg

SEQ ID NO: 1592 - DNA, 20 bp, Artificial Sequence
  Synthetic polynucleotide
caggtgctgatcgagctccc

SEQ ID NO: 1593 - DNA, 20 bp, Artificial Sequence
  Synthetic polynucleotide
gctgcccagagtataccctg

SEQ ID NO: 1594 - DNA, 20 bp, Artificial Sequence
  Synthetic polynucleotide
tcttcgcgaaccacaaagga

SEQ ID NO: 1595 - DNA, 20 bp, Artificial Sequence
  Synthetic polynucleotide
actctgccaattcgacgggg

SEQ ID NO: 1596 - DNA, 20 bp, Artificial Sequence
  Synthetic polynucleotide
cgcccacaggactgtaacga

SEQ ID NO: 1597 - DNA, 20 bp, Artificial Sequence
  Synthetic polynucleotide
aagcgtcgtcagtatacggc

SEQ ID NO: 1598 - DNA, 20 bp, Artificial Sequence
  Synthetic polynucleotide
cgggtacagacttgatacgc

SEQ ID NO: 1599 - DNA, 20 bp, Artificial Sequence
  Synthetic polynucleotide
actcaccttgagcttgcttt

SEQ ID NO: 1600 - DNA, 20 bp, Artificial Sequence
  Synthetic polynucleotide
ccaaggcggtaacgtattcc

SEQ ID NO: 1601 - DNA, 20 bp, Artificial Sequence
  Synthetic polynucleotide
gcgatccggtagcttaattt

SEQ ID NO: 1602 - DNA, 20 bp, Artificial Sequence
  Synthetic polynucleotide
tggagccgcttagcattgtt

SEQ ID NO: 1603 - DNA, 20 bp, Artificial Sequence
  Synthetic polynucleotide
tggtgccgtttgattgccct

SEQ ID NO: 1604 - DNA, 20 bp, Artificial Sequence
  Synthetic polynucleotide
tcgcgaccgcgaacaagtct

SEQ ID NO: 1605 - DNA, 20 bp, Artificial Sequence
  Synthetic polynucleotide
agggctctccattccaaaac

SEQ ID NO: 1606 - DNA, 20 bp, Artificial Sequence
  Synthetic polynucleotide
gtgacgccgcccagctcgtt

SEQ ID NO: 1607 - DNA, 20 bp, Artificial Sequence
  Synthetic polynucleotide
tgaggcccggctgcttacaa

SEQ ID NO: 1608 - DNA, 20 bp, Artificial Sequence
  Synthetic polynucleotide
ccccacctaccagccagaaa

SEQ ID NO: 1609 - DNA, 20 bp, Artificial Sequence
  Synthetic polynucleotide
ccactgcacgccaaccggag

SEQ ID NO: 1610 - DNA, 20 bp, Artificial Sequence
  Synthetic polynucleotide
cgtcgaccgtgtgtatgggc

SEQ ID NO: 1611 - DNA, 20 bp, Artificial Sequence
  Synthetic polynucleotide
gagtggccccttctcaaaga

SEQ ID NO: 1612 - DNA, 20 bp, Artificial Sequence
  Synthetic polynucleotide
ggagcacttcagaaccccgg

SEQ ID NO: 1613 - DNA, 20 bp, Artificial Sequence
  Synthetic polynucleotide
ccgagtctctcatgcacaga

SEQ ID NO: 1614 - DNA, 20 bp, Artificial Sequence
  Synthetic polynucleotide
atttaacgggatttatattt

SEQ ID NO: 1615 - DNA, 20 bp, Artificial Sequence
  Synthetic polynucleotide
taacaacaggaacaataaaa

SEQ ID NO: 1616 - DNA, 20 bp, Artificial Sequence
  Synthetic polynucleotide
ttaattctatatggtattaa

SEQ ID NO: 1617 - DNA, 20 bp, Artificial Sequence
  Synthetic polynucleotide
ttaaaactgggcagttaagg

SEQ ID NO: 1618 - DNA, 20 bp, Artificial Sequence
  Synthetic polynucleotide
ttaaaacataaaggaaataa

SEQ ID NO: 1619 - DNA, 20 bp, Artificial Sequence
  Synthetic polynucleotide
atagtgcatataaaggatta

SEQ ID NO: 1620 - DNA, 20 bp, Artificial Sequence
  Synthetic polynucleotide
ttaatacgtagtttggtgta

SEQ ID NO: 1621 - DNA, 20 bp, Artificial Sequence
  Synthetic polynucleotide
agtcatctgagaaagggtaa

SEQ ID NO: 1622 - DNA, 20 bp, Artificial Sequence
  Synthetic polynucleotide
atatatccaggggacgagta

SEQ ID NO: 1623 - DNA, 20 bp, Artificial Sequence
  Synthetic polynucleotide
tgtacacagaatcgggggtg

SEQ ID NO: 1624 - DNA, 20 bp, Artificial Sequence
  Synthetic polynucleotide
cgttgtcaaagaagaatgaa

SEQ ID NO: 1625 - DNA, 20 bp, Artificial Sequence
  Synthetic polynucleotide
gagagtcgtgcattgtgtgt

SEQ ID NO: 1626 - DNA, 20 bp, Artificial Sequence
  Synthetic polynucleotide
gaataccagtaaaggacaaa

SEQ ID NO: 1627 - DNA, 20 bp, Artificial Sequence
  Synthetic polynucleotide
ctaaagcggataaatgacgg

SEQ ID NO: 1628 - DNA, 20 bp, Artificial Sequence
  Synthetic polynucleotide
taaaaacattataaacgaac

SEQ ID NO: 1629 - DNA, 20 bp, Artificial Sequence
  Synthetic polynucleotide
gatgttcaattgggatattt

SEQ ID NO: 1630 - DNA, 20 bp, Artificial Sequence
  Synthetic polynucleotide
aaagttcgttggtcggttct

SEQ ID NO: 1631 - DNA, 20 bp, Artificial Sequence
  Synthetic polynucleotide
catatgcagctggggtatat

SEQ ID NO: 1632 - DNA, 20 bp, Artificial Sequence
  Synthetic polynucleotide
tgggttcgtatagtgggtgt

SEQ ID NO: 1633 - DNA, 20 bp, Artificial Sequence
  Synthetic polynucleotide
atccgtcctgttgggatttg

SEQ ID NO: 1634 - DNA, 20 bp, Artificial Sequence
  Synthetic polynucleotide
tcgtaacgaaggggtatcca

SEQ ID NO: 1635 - DNA, 20 bp, Artificial Sequence
  Synthetic polynucleotide
tacattcttggggagagtat

SEQ ID NO: 1636 - DNA, 20 bp, Artificial Sequence
  Synthetic polynucleotide
taaattcagagaatgggaat

SEQ ID NO: 1637 - DNA, 20 bp, Artificial Sequence
  Synthetic polynucleotide
cggaatccatatggggccat

SEQ ID NO: 1638 - DNA, 20 bp, Artificial Sequence
  Synthetic polynucleotide
ataggccttgaaggatagga

SEQ ID NO: 1639 - DNA, 20 bp, Artificial Sequence
  Synthetic polynucleotide
cacatccgcgatacaagaca

SEQ ID NO: 1640 - DNA, 20 bp, Artificial Sequence
  Synthetic polynucleotide
tagaagccgcaagatggaga

SEQ ID NO: 1641 - DNA, 20 bp, Artificial Sequence
  Synthetic polynucleotide
agtttgcgaggtttacaggg

SEQ ID NO: 1642 - DNA, 20 bp, Artificial Sequence
  Synthetic polynucleotide
ttaggtcgacggaaacgaga

SEQ ID NO: 1643 - DNA, 20 bp, Artificial Sequence
  Synthetic polynucleotide
atcgcgcataataggctggc

SEQ ID NO: 1644 - DNA, 20 bp, Artificial Sequence
  Synthetic polynucleotide
gtagggctatgctgggctct

SEQ ID NO: 1645 - DNA, 20 bp, Artificial Sequence
  Synthetic polynucleotide
cgggatctgggcaaatttct

SEQ ID NO: 1646 - DNA, 20 bp, Artificial Sequence
  Synthetic polynucleotide
aattctccaatggggctttg

SEQ ID NO: 1647 - DNA, 20 bp, Artificial Sequence
  Synthetic polynucleotide
tacaatctacgtggggaatt

SEQ ID NO: 1648 - DNA, 20 bp, Artificial Sequence
  Synthetic polynucleotide
taaacgctgggggatctatt

SEQ ID NO: 1649 - DNA, 20 bp, Artificial Sequence
  Synthetic polynucleotide
gggactcttcttgcttgtct

SEQ ID NO: 1650 - DNA, 20 bp, Artificial Sequence
  Synthetic polynucleotide
caattactgtggggagcaca

SEQ ID NO: 1651 - DNA, 20 bp, Artificial Sequence
  Synthetic polynucleotide
tggtttccctcgtgggtggg

SEQ ID NO: 1652 - DNA, 20 bp, Artificial Sequence
  Synthetic polynucleotide
cctgaacgggcatattgacg

SEQ ID NO: 1653 - DNA, 20 bp, Artificial Sequence
  Synthetic polynucleotide
tggcgacgcaacaggtgaac

SEQ ID NO: 1654 - DNA, 20 bp, Artificial Sequence
  Synthetic polynucleotide
taggttccctatcgtggtgt

SEQ ID NO: 1655 - DNA, 20 bp, Artificial Sequence
  Synthetic polynucleotide
aacgggctgagaaagatgaa

SEQ ID NO: 1656 - DNA, 20 bp, Artificial Sequence
  Synthetic polynucleotide
tacggacggctaagaacaga

SEQ ID NO: 1657 - DNA, 20 bp, Artificial Sequence
  Synthetic polynucleotide
gacatcctggactggaccac

SEQ ID NO: 1658 - DNA, 20 bp, Artificial Sequence
  Synthetic polynucleotide
taaacactttagcacggcgg

SEQ ID NO: 1659 - DNA, 20 bp, Artificial Sequence
  Synthetic polynucleotide
cggcgacggagggcactcct

SEQ ID NO: 1660 - DNA, 20 bp, Artificial Sequence
  Synthetic polynucleotide
gtcggtcgggggcataaatg

SEQ ID NO: 1661 - DNA, 20 bp, Artificial Sequence
  Synthetic polynucleotide
ggaggtcggcgggcctgcct

SEQ ID NO: 1662 - DNA, 20 bp, Artificial Sequence
  Synthetic polynucleotide
tggtcccgggtagggcgatt

SEQ ID NO: 1663 - DNA, 20 bp, Artificial Sequence
  Synthetic polynucleotide
taatctctgccacgggttac

SEQ ID NO: 1664 - DNA, 20 bp, Artificial Sequence
  Synthetic polynucleotide
tattaccgagaagggccttc

SEQ ID NO: 1665 - DNA, 20 bp, Artificial Sequence
  Synthetic polynucleotide
aatgggcgtcaaccaggctc

SEQ ID NO: 1666 - DNA, 20 bp, Artificial Sequence
  Synthetic polynucleotide
tgctaacgtcccaagctccc

SEQ ID NO: 1667 - DNA, 20 bp, Artificial Sequence
  Synthetic polynucleotide
aatcctcttcggggccatgg

SEQ ID NO: 1668 - DNA, 20 bp, Artificial Sequence
  Synthetic polynucleotide
ctagcacgtcggcgacagaa

SEQ ID NO: 1669 - DNA, 20 bp, Artificial Sequence
  Synthetic polynucleotide
taaggacaccatgttggagt

SEQ ID NO: 1670 - DNA, 20 bp, Artificial Sequence
  Synthetic polynucleotide
taaagcctaagatacgcgcg

SEQ ID NO: 1671 - DNA, 20 bp, Artificial Sequence
  Synthetic polynucleotide
actactcaagccatgagagc

SEQ ID NO: 1672 - DNA, 20 bp, Artificial Sequence
  Synthetic polynucleotide
atagacccacattcgcgagc

SEQ ID NO: 1673 - DNA, 20 bp, Artificial Sequence
  Synthetic polynucleotide
agtcggcacgaagatcacga

SEQ ID NO: 1674 - DNA, 20 bp, Artificial Sequence
  Synthetic polynucleotide
tgtcagcccgggtcatttcc

SEQ ID NO: 1675 - DNA, 20 bp, Artificial Sequence
  Synthetic polynucleotide
ggcggccgcgccgagcgcga

SEQ ID NO: 1676 - DNA, 20 bp, Artificial Sequence
  Synthetic polynucleotide
gacgggctgccgggcctttg

SEQ ID NO: 1677 - DNA, 20 bp, Artificial Sequence
  Synthetic polynucleotide
gcgtggctaacgcggggtat

SEQ ID NO: 1678 - DNA, 20 bp, Artificial Sequence
  Synthetic polynucleotide
gatcgacctgtctcgggtct

SEQ ID NO: 1679 - DNA, 20 bp, Artificial Sequence
  Synthetic polynucleotide
acgatccccccacctagtct

SEQ ID NO: 1680 - DNA, 20 bp, Artificial Sequence
  Synthetic polynucleotide
cagtgtcgttcctccctccc

SEQ ID NO: 1681 - DNA, 20 bp, Artificial Sequence
  Synthetic polynucleotide
cccaaccagcaccaggggct

SEQ ID NO: 1682 - DNA, 20 bp, Artificial Sequence
  Synthetic polynucleotide
gggacgcggcacaaacaaac

SEQ ID NO: 1683 - DNA, 20 bp, Artificial Sequence
  Synthetic polynucleotide
tagaggcgtgcagacgcaga

SEQ ID NO: 1684 - DNA, 20 bp, Artificial Sequence
  Synthetic polynucleotide
tgaacgcaacggcgcgaccg

SEQ ID NO: 1685 - DNA, 20 bp, Artificial Sequence
  Synthetic polynucleotide
gataggcttgtggcgccggg

SEQ ID NO: 1686 - DNA, 20 bp, Artificial Sequence
  Synthetic polynucleotide
cgttgactatggtacgccgc

SEQ ID NO: 1687 - DNA, 20 bp, Artificial Sequence
  Synthetic polynucleotide
agctcccggacacggtgagg

SEQ ID NO: 1688 - DNA, 20 bp, Artificial Sequence
  Synthetic polynucleotide
cagaggcttcggttgccagc

SEQ ID NO: 1689 - DNA, 20 bp, Artificial Sequence
  Synthetic polynucleotide
gttgggctggtaattaaaaa

SEQ ID NO: 1690 - DNA, 20 bp, Artificial Sequence
  Synthetic polynucleotide
atttgactgggtaaattatt

SEQ ID NO: 1691 - DNA, 20 bp, Artificial Sequence
  Synthetic polynucleotide
ttataacaatataataaata

SEQ ID NO: 1692 - DNA, 20 bp, Artificial Sequence
  Synthetic polynucleotide
ctaactctttgctggttctt

SEQ ID NO: 1693 - DNA, 20 bp, Artificial Sequence
  Synthetic polynucleotide
ataaaacgggaggaaaaaaa

SEQ ID NO: 1694 - DNA, 20 bp, Artificial Sequence
  Synthetic polynucleotide
tattacctagttggatgttt

SEQ ID NO: 1695 - DNA, 20 bp, Artificial Sequence
  Synthetic polynucleotide
tttgatctataagaaataag

SEQ ID NO: 1696 - DNA, 20 bp, Artificial Sequence
  Synthetic polynucleotide
tttaaactagtgcagggacg

SEQ ID NO: 1697 - DNA, 20 bp, Artificial Sequence
  Synthetic polynucleotide
taaattcagtgaaggtaagt

SEQ ID NO: 1698 - DNA, 20 bp, Artificial Sequence
  Synthetic polynucleotide
tattaactaaaagagtgaag

SEQ ID NO: 1699 - DNA, 20 bp, Artificial Sequence
  Synthetic polynucleotide
aaaagactaaaaggttagga

SEQ ID NO: 1700 - DNA, 20 bp, Artificial Sequence
  Synthetic polynucleotide
tcgtatctaaagaaaagaag

SEQ ID NO: 1701 - DNA, 20 bp, Artificial Sequence
  Synthetic polynucleotide
aagttacaaaaggggattgc

SEQ ID NO: 1702 - DNA, 20 bp, Artificial Sequence
  Synthetic polynucleotide
tatgatcaatagaaaggaga

SEQ ID NO: 1703 - DNA, 20 bp, Artificial Sequence
  Synthetic polynucleotide
ttatatcttatagaaaacga

SEQ ID NO: 1704 - DNA, 20 bp, Artificial Sequence
  Synthetic polynucleotide
ctgcttcagactcttattct

SEQ ID NO: 1705 - DNA, 20 bp, Artificial Sequence
  Synthetic polynucleotide
ttgaatcggggagtaattag

SEQ ID NO: 1706 - DNA, 20 bp, Artificial Sequence
  Synthetic polynucleotide
ttcaatccgggcatttatta

SEQ ID NO: 1707 - DNA, 20 bp, Artificial Sequence
  Synthetic polynucleotide
ccaactcggtttccacatca

SEQ ID NO: 1708 - DNA, 20 bp, Artificial Sequence
  Synthetic polynucleotide
cgacttcggggggagagttt

SEQ ID NO: 1709 - DNA, 20 bp, Artificial Sequence
  Synthetic polynucleotide
gtttatctggaagtaagtta

SEQ ID NO: 1710 - DNA, 20 bp, Artificial Sequence
  Synthetic polynucleotide
tgcagacatataaggggatt

SEQ ID NO: 1711 - DNA, 20 bp, Artificial Sequence
  Synthetic polynucleotide
tatcatcctaatggccctcc

SEQ ID NO: 1712 - DNA, 20 bp, Artificial Sequence
  Synthetic polynucleotide
gtcatacaggacgtggttgg

SEQ ID NO: 1713 - DNA, 20 bp, Artificial Sequence
  Synthetic polynucleotide
ttattgcctggtgtgtggtg

SEQ ID NO: 1714 - DNA, 20 bp, Artificial Sequence
  Synthetic polynucleotide
gggatccggaagtcaaggaa

SEQ ID NO: 1715 - DNA, 20 bp, Artificial Sequence
  Synthetic polynucleotide
tcttgacaggggtactgcaa

SEQ ID NO: 1716 - DNA, 20 bp, Artificial Sequence
  Synthetic polynucleotide
atggaacaccacacaaccac

SEQ ID NO: 1717 - DNA, 20 bp, Artificial Sequence
  Synthetic polynucleotide
gattcgcaagggtattaggg

SEQ ID NO: 1718 - DNA, 20 bp, Artificial Sequence
  Synthetic polynucleotide
gttatgcaaggcattggagg

SEQ ID NO: 1719 - DNA, 20 bp, Artificial Sequence
  Synthetic polynucleotide
atcctgctgacagctcttct

SEQ ID NO: 1720 - DNA, 20 bp, Artificial Sequence
  Synthetic polynucleotide
attggtcgtgggccagttct

SEQ ID NO: 1721 - DNA, 20 bp, Artificial Sequence
  Synthetic polynucleotide
acgggccgctggtttagtct

SEQ ID NO: 1722 - DNA, 20 bp, Artificial Sequence
  Synthetic polynucleotide
gtatcacggtatcgtatttg

SEQ ID NO: 1723 - DNA, 20 bp, Artificial Sequence
  Synthetic polynucleotide
ttggttccgcaagagggtct

SEQ ID NO: 1724 - DNA, 20 bp, Artificial Sequence
  Synthetic polynucleotide
gttaacccagatcttgggct

SEQ ID NO: 1725 - DNA, 20 bp, Artificial Sequence
  Synthetic polynucleotide
atagaccggcgctaggtaca

SEQ ID NO: 1726 - DNA, 20 bp, Artificial Sequence
  Synthetic polynucleotide
gaattccacgtggttggttg

SEQ ID NO: 1727 - DNA, 20 bp, Artificial Sequence
  Synthetic polynucleotide
tgacagcatgggaagagatg

SEQ ID NO: 1728 - DNA, 20 bp, Artificial Sequence
  Synthetic polynucleotide
tgtccgcgtggaaaagtgag

SEQ ID NO: 1729 - DNA, 20 bp, Artificial Sequence
  Synthetic polynucleotide
gttacaccctcaaggtgagc

SEQ ID NO: 1730 - DNA, 20 bp, Artificial Sequence
  Synthetic polynucleotide
ttgcgcctttggaggagtga

SEQ ID NO: 1731 - DNA, 20 bp, Artificial Sequence
  Synthetic polynucleotide
tttgttcaggagaagatgga

SEQ ID NO: 1732 - DNA, 20 bp, Artificial Sequence
  Synthetic polynucleotide
ataggtcataagacccgcac

SEQ ID NO: 1733 - DNA, 20 bp, Artificial Sequence
  Synthetic polynucleotide
tttgatctgagtgtcagaga

SEQ ID NO: 1734 - DNA, 20 bp, Artificial Sequence
  Synthetic polynucleotide
gctcggctggtctgctgtct

SEQ ID NO: 1735 - DNA, 20 bp, Artificial Sequence
  Synthetic polynucleotide
tttcgtcgtgggggtattca

SEQ ID NO: 1736 - DNA, 20 bp, Artificial Sequence
  Synthetic polynucleotide
gctgggcgattacggcaacg

SEQ ID NO: 1737 - DNA, 20 bp, Artificial Sequence
  Synthetic polynucleotide
gcgcgcccaacagggctgct

SEQ ID NO: 1738 - DNA, 20 bp, Artificial Sequence
  Synthetic polynucleotide
gctggcccgaccgtagggct

SEQ ID NO: 1739 - DNA, 20 bp, Artificial Sequence
  Synthetic polynucleotide
agacaccccacaggggggcc

SEQ ID NO: 1740 - DNA, 20 bp, Artificial Sequence
  Synthetic polynucleotide
cttcgcccaccctttccgcc

SEQ ID NO: 1741 - DNA, 20 bp, Artificial Sequence
  Synthetic polynucleotide
cagcgaccttccctatcccc

SEQ ID NO: 1742 - DNA, 20 bp, Artificial Sequence
  Synthetic polynucleotide
gagaaacagggggtatggaa

SEQ ID NO: 1743 - DNA, 20 bp, Artificial Sequence
  Synthetic polynucleotide
tatccccagcggtgtgtcgg

SEQ ID NO: 1744 - DNA, 20 bp, Artificial Sequence
  Synthetic polynucleotide
catacccccggagatcgaac

SEQ ID NO: 1745 - DNA, 20 bp, Artificial Sequence
  Synthetic polynucleotide
tctctgctgggacgcccgga

SEQ ID NO: 1746 - DNA, 20 bp, Artificial Sequence
  Synthetic polynucleotide
agagggcgctatagcagggg

SEQ ID NO: 1747 - DNA, 20 bp, Artificial Sequence
  Synthetic polynucleotide
taccgactgtcctgcaccac

SEQ ID NO: 1748 - DNA, 20 bp, Artificial Sequence
  Synthetic polynucleotide
tggacacaagtatgcggggg

SEQ ID NO: 1749 - DNA, 20 bp, Artificial Sequence
  Synthetic polynucleotide
gcccgtcgggtgcgctcgct

SEQ ID NO: 1750 - DNA, 20 bp, Artificial Sequence
  Synthetic polynucleotide
tggcttccggcggctggttt

SEQ ID NO: 1751 - DNA, 20 bp, Artificial Sequence
  Synthetic polynucleotide
gctgccccggttggcttcca

SEQ ID NO: 1752 - DNA, 20 bp, Artificial Sequence
  Synthetic polynucleotide
tcgtgacggctggtgggtgc

SEQ ID NO: 1753 - DNA, 20 bp, Artificial Sequence
  Synthetic polynucleotide
aggggccctggccctgccta

SEQ ID NO: 1754 - DNA, 20 bp, Artificial Sequence
  Synthetic polynucleotide
tttaggcgggggtggtctcc

SEQ ID NO: 1755 - DNA, 20 bp, Artificial Sequence
  Synthetic polynucleotide
tggctcccacgccatggccg

SEQ ID NO: 1756 - DNA, 20 bp, Artificial Sequence
  Synthetic polynucleotide
accatgcggaacctcaggcg

SEQ ID NO: 1757 - DNA, 20 bp, Artificial Sequence
  Synthetic polynucleotide
attgaaccgtgtgagggccc

SEQ ID NO: 1758 - DNA, 20 bp, Artificial Sequence
  Synthetic polynucleotide
cgttagcgcgaccgtggaac

SEQ ID NO: 1759 - DNA, 20 bp, Artificial Sequence
  Synthetic polynucleotide
cattcccgcggaaggcacgc

SEQ ID NO: 1760 - DNA, 20 bp, Artificial Sequence
  Synthetic polynucleotide
taaaagccccccggctccgg

SEQ ID NO: 1761 - DNA, 20 bp, Artificial Sequence
  Synthetic polynucleotide
gaggtccgagacgtctccgt

SEQ ID NO: 1762 - DNA, 20 bp, Artificial Sequence
  Synthetic polynucleotide
tcgatccgaggtatcccggg

SEQ ID NO: 1763 - DNA, 20 bp, Artificial Sequence
  Synthetic polynucleotide
gtcggccaggtggtaacagg

SEQ ID NO: 1764 - DNA, 20 bp, Artificial Sequence
  Synthetic polynucleotide
tatttaccaatgtattattt

SEQ ID NO: 1765 - DNA, 20 bp, Artificial Sequence
  Synthetic polynucleotide
cattaactattaaataaatt

SEQ ID NO: 1766 - DNA, 20 bp, Artificial Sequence
  Synthetic polynucleotide
tttgtgctttattcttattt

SEQ ID NO: 1767 - DNA, 20 bp, Artificial Sequence
  Synthetic polynucleotide
aaaaaactgaaaacaattat

SEQ ID NO: 1768 - DNA, 20 bp, Artificial Sequence
  Synthetic polynucleotide
tcttatctcttctgagatct

SEQ ID NO: 1769 - DNA, 20 bp, Artificial Sequence
  Synthetic polynucleotide
caaggacaattaaaaaataa

SEQ ID NO: 1770 - DNA, 20 bp, Artificial Sequence
  Synthetic polynucleotide
caaagacatgatatataact

SEQ ID NO: 1771 - DNA, 20 bp, Artificial Sequence
  Synthetic polynucleotide
ggaggtcagggaagtttcat

SEQ ID NO: 1772 - DNA, 20 bp, Artificial Sequence
  Synthetic polynucleotide
tgaatacttgttgttatgtt

SEQ ID NO: 1773 - DNA, 20 bp, Artificial Sequence
  Synthetic polynucleotide
ggttagcgaaatgaatgaat

SEQ ID NO: 1774 - DNA, 20 bp, Artificial Sequence
  Synthetic polynucleotide
atcgaacgaaaaactaacta

SEQ ID NO: 1775 - DNA, 20 bp, Artificial Sequence
  Synthetic polynucleotide
tagaaacaaaaactacgcaa

SEQ ID NO: 1776 - DNA, 20 bp, Artificial Sequence
  Synthetic polynucleotide
tgtgtgctatggttaaggga

SEQ ID NO: 1777 - DNA, 20 bp, Artificial Sequence
  Synthetic polynucleotide
ccctgtctaaggttaacagt

SEQ ID NO: 1778 - DNA, 20 bp, Artificial Sequence
  Synthetic polynucleotide
ctaacacgaaaaaaaccaac

SEQ ID NO: 1779 - DNA, 20 bp, Artificial Sequence
  Synthetic polynucleotide
tagcaaccgaggggttattt

SEQ ID NO: 1780 - DNA, 20 bp, Artificial Sequence
  Synthetic polynucleotide
atgaatcggtttgtttattt

SEQ ID NO: 1781 - DNA, 20 bp, Artificial Sequence
  Synthetic polynucleotide
aacgcactggctgcctttaa

SEQ ID NO: 1782 - DNA, 20 bp, Artificial Sequence
  Synthetic polynucleotide
gtatgcctgtatgaggcttg

SEQ ID NO: 1783 - DNA, 20 bp, Artificial Sequence
  Synthetic polynucleotide
tggccgcaaaaacgtattat

SEQ ID NO: 1784 - DNA, 20 bp, Artificial Sequence
  Synthetic polynucleotide
tttgtgcatgattctgtctt

SEQ ID NO: 1785 - DNA, 20 bp, Artificial Sequence
  Synthetic polynucleotide
tgcactcctagaagagaaat

SEQ ID NO: 1786 - DNA, 20 bp, Artificial Sequence
  Synthetic polynucleotide
taatagccgatacgaaaacc

SEQ ID NO: 1787 - DNA, 20 bp, Artificial Sequence
  Synthetic polynucleotide
tctacactaaaacaaggacg

SEQ ID NO: 1788 - DNA, 20 bp, Artificial Sequence
  Synthetic polynucleotide
ataaaactcctatcctcacc

SEQ ID NO: 1789 - DNA, 20 bp, Artificial Sequence
  Synthetic polynucleotide
ttcgcgcaactggatagcaa

SEQ ID NO: 1790 - DNA, 20 bp, Artificial Sequence
  Synthetic polynucleotide
caatttcaagatttgggtga

SEQ ID NO: 1791 - DNA, 20 bp, Artificial Sequence
  Synthetic polynucleotide
ctgggtcagacaggcaaagg

SEQ ID NO: 1792 - DNA, 20 bp, Artificial Sequence
  Synthetic polynucleotide
gatttgcagaccgacaacag

SEQ ID NO: 1793 - DNA, 20 bp, Artificial Sequence
  Synthetic polynucleotide
attgtacagggtcagacgag

SEQ ID NO: 1794 - DNA, 20 bp, Artificial Sequence
  Synthetic polynucleotide
gctgttcgctgaaggggctt

SEQ ID NO: 1795 - DNA, 20 bp, Artificial Sequence
  Synthetic polynucleotide
ggccatcatgaggatattta

SEQ ID NO: 1796 - DNA, 20 bp, Artificial Sequence
  Synthetic polynucleotide
gcggttctgcctcgtcattt

SEQ ID NO: 1797 - DNA, 20 bp, Artificial Sequence
  Synthetic polynucleotide
aagagtctagcggcaaatag

SEQ ID NO: 1798 - DNA, 20 bp, Artificial Sequence
  Synthetic polynucleotide
ggctaacaggtaggggtgct

SEQ ID NO: 1799 - DNA, 20 bp, Artificial Sequence
  Synthetic polynucleotide
acctttcgtggtctaatcct

SEQ ID NO: 1800 - DNA, 20 bp, Artificial Sequence
  Synthetic polynucleotide
tcggtgcggtaatcaggttc

SEQ ID NO: 1801 - DNA, 20 bp, Artificial Sequence
  Synthetic polynucleotide
catgcgccattcgaggtgcc

SEQ ID NO: 1802 - DNA, 20 bp, Artificial Sequence
  Synthetic polynucleotide
tctagtcagttgggcatgta

SEQ ID NO: 1803 - DNA, 20 bp, Artificial Sequence
  Synthetic polynucleotide
ggacctcagccctacagaca

SEQ ID NO: 1804 - DNA, 20 bp, Artificial Sequence
  Synthetic polynucleotide
acgggacagcaggatcaaga

SEQ ID NO: 1805 - DNA, 20 bp, Artificial Sequence
  Synthetic polynucleotide
ttggtgctaatacgcttcgg

SEQ ID NO: 1806 - DNA, 20 bp, Artificial Sequence
  Synthetic polynucleotide
taaacgcaagggttcccggc

SEQ ID NO: 1807 - DNA, 20 bp, Artificial Sequence
  Synthetic polynucleotide
aacaaacacaactacacaag

SEQ ID NO: 1808 - DNA, 20 bp, Artificial Sequence
  Synthetic polynucleotide
gggatccaggtagtcaaagg

SEQ ID NO: 1809 - DNA, 20 bp, Artificial Sequence
  Synthetic polynucleotide
aaacttcaggccgctcttcc

SEQ ID NO: 1810 - DNA, 20 bp, Artificial Sequence
  Synthetic polynucleotide
ctggcgcggaatcgccttct

SEQ ID NO: 1811 - DNA, 20 bp, Artificial Sequence
  Synthetic polynucleotide
atggagcgccttgcgcttta

SEQ ID NO: 1812 - DNA, 20 bp, Artificial Sequence
  Synthetic polynucleotide
ctggaacctgtcgactgcct

SEQ ID NO: 1813 - DNA, 20 bp, Artificial Sequence
  Synthetic polynucleotide
cggctgctcggaactgtgct

SEQ ID NO: 1814 - DNA, 20 bp, Artificial Sequence
  Synthetic polynucleotide
cttcgtctttgaggcttacg

SEQ ID NO: 1815 - DNA, 20 bp, Artificial Sequence
  Synthetic polynucleotide
gcgaaacgcatcacaccgcc

SEQ ID NO: 1816 - DNA, 20 bp, Artificial Sequence
  Synthetic polynucleotide
taggtactacagcgcgtact

SEQ ID NO: 1817 - DNA, 20 bp, Artificial Sequence
  Synthetic polynucleotide
cctagtcccaaactggcgca

SEQ ID NO: 1818 - DNA, 20 bp, Artificial Sequence
  Synthetic polynucleotide
cgttgtcgagactgatcgcg

SEQ ID NO: 1819 - DNA, 20 bp, Artificial Sequence
  Synthetic polynucleotide
acgacacctagtggcaagtt

SEQ ID NO: 1820 - DNA, 20 bp, Artificial Sequence
  Synthetic polynucleotide
tgagcgctcccgacccggag

SEQ ID NO: 1821 - DNA, 20 bp, Artificial Sequence
  Synthetic polynucleotide
tagagacattccagtgcagc

SEQ ID NO: 1822 - DNA, 20 bp, Artificial Sequence
  Synthetic polynucleotide
tatagccgatataccgctga

SEQ ID NO: 1823 - DNA, 20 bp, Artificial Sequence
  Synthetic polynucleotide
gaccctcggatacggacagg

SEQ ID NO: 1824 - DNA, 20 bp, Artificial Sequence
  Synthetic polynucleotide
ggcagccccgcggcgccgct

SEQ ID NO: 1825 - DNA, 20 bp, Artificial Sequence
  Synthetic polynucleotide
cacctgcgcgttgagtttcg

SEQ ID NO: 1826 - DNA, 20 bp, Artificial Sequence
  Synthetic polynucleotide
atccgtctggcctgccttct

SEQ ID NO: 1827 - DNA, 20 bp, Artificial Sequence
  Synthetic polynucleotide
gccgcgcgcgactggagtct

SEQ ID NO: 1828 - DNA, 20 bp, Artificial Sequence
  Synthetic polynucleotide
tccgtccacctacgctgctt

SEQ ID NO: 1829 - DNA, 20 bp, Artificial Sequence
  Synthetic polynucleotide
cagcgtcgcggccgctattc

SEQ ID NO: 1830 - DNA, 20 bp, Artificial Sequence
  Synthetic polynucleotide
ttggagcgtctacctggcag

SEQ ID NO: 1831 - DNA, 20 bp, Artificial Sequence
  Synthetic polynucleotide
acccaacccgcggtggcaca

SEQ ID NO: 1832 - DNA, 20 bp, Artificial Sequence
  Synthetic polynucleotide
catacgctgttgcttcgccg

SEQ ID NO: 1833 - DNA, 20 bp, Artificial Sequence
  Synthetic polynucleotide
ccccagcgaatgcgctgggc

SEQ ID NO: 1834 - DNA, 20 bp, Artificial Sequence
  Synthetic polynucleotide
gggttgcgatggcgagcaga

SEQ ID NO: 1835 - DNA, 20 bp, Artificial Sequence
  Synthetic polynucleotide
gcgggtcctgacatccagtc

SEQ ID NO: 1836 - DNA, 20 bp, Artificial Sequence
  Synthetic polynucleotide
gtagtgcggaggcacagagc

SEQ ID NO: 1837 - DNA, 20 bp, Artificial Sequence
  Synthetic polynucleotide
tttaggccgaaacctgccaa

SEQ ID NO: 1838 - DNA, 20 bp, Artificial Sequence
  Synthetic polynucleotide
gtcgcgcctttaggccccgc

SEQ ID NO: 1839 - DNA, 20 bp, Artificial Sequence
  Synthetic polynucleotide
tggctactctttaaatttat

SEQ ID NO: 1840 - DNA, 20 bp, Artificial Sequence
  Synthetic polynucleotide
tgtaagcaaataattaaaaa

SEQ ID NO: 1841 - DNA, 20 bp, Artificial Sequence
  Synthetic polynucleotide
tcataacatattatttattt

SEQ ID NO: 1842 - DNA, 20 bp, Artificial Sequence
  Synthetic polynucleotide
aagggacggatttagaatta

SEQ ID NO: 1843 - DNA, 20 bp, Artificial Sequence
  Synthetic polynucleotide
aagtcgcgttgaaataaaaa

SEQ ID NO: 1844 - DNA, 20 bp, Artificial Sequence
  Synthetic polynucleotide
aaaaaacagcttattatctt

SEQ ID NO: 1845 - DNA, 20 bp, Artificial Sequence
  Synthetic polynucleotide
ttataacaaaacgaaagtaa

SEQ ID NO: 1846 - DNA, 20 bp, Artificial Sequence
  Synthetic polynucleotide
gctatactaaaaaaggtata

SEQ ID NO: 1847 - DNA, 20 bp, Artificial Sequence
  Synthetic polynucleotide
gtggttctgaaaaacaaaac

SEQ ID NO: 1848 - DNA, 20 bp, Artificial Sequence
  Synthetic polynucleotide
atttggcgttgaagagtgta

SEQ ID NO: 1849 - DNA, 20 bp, Artificial Sequence
  Synthetic polynucleotide
acaaaactaatgtagtcaaa

SEQ ID NO: 1850 - DNA, 20 bp, Artificial Sequence
  Synthetic polynucleotide
agtagtcgaaagatataagt

SEQ ID NO: 1851 - DNA, 20 bp, Artificial Sequence
  Synthetic polynucleotide
gtttcccaagaaaccaacac

SEQ ID NO: 1852 - DNA, 20 bp, Artificial Sequence
  Synthetic polynucleotide
caagaacgagataaagcaaa

SEQ ID NO: 1853 - DNA, 20 bp, Artificial Sequence
  Synthetic polynucleotide
taagagctagtaaaaaccaa

SEQ ID NO: 1854 - DNA, 20 bp, Artificial Sequence
  Synthetic polynucleotide
atgttacggccggtttaatg

SEQ ID NO: 1855 - DNA, 20 bp, Artificial Sequence
  Synthetic polynucleotide
tggggtctattgtttcgtct

SEQ ID NO: 1856 - DNA, 20 bp, Artificial Sequence
  Synthetic polynucleotide
ttaactcatgtgtctatttg

SEQ ID NO: 1857 - DNA, 20 bp, Artificial Sequence
  Synthetic polynucleotide
tcgctgctttgtatttgttc

SEQ ID NO: 1858 - DNA, 20 bp, Artificial Sequence
  Synthetic polynucleotide
gtgatgcgtgctgaataatg

SEQ ID NO: 1859 - DNA, 20 bp, Artificial Sequence
  Synthetic polynucleotide
catggcctggaagatattag

SEQ ID NO: 1860 - DNA, 20 bp, Artificial Sequence
  Synthetic polynucleotide
ttcgaccttaccgcaatgat

SEQ ID NO: 1861 - DNA, 20 bp, Artificial Sequence
  Synthetic polynucleotide
acatagcgcaagttagtaaa

SEQ ID NO: 1862 - DNA, 20 bp, Artificial Sequence
  Synthetic polynucleotide
tctactctgtcctgttcaaa

SEQ ID NO: 1863 - DNA, 20 bp, Artificial Sequence
  Synthetic polynucleotide
aaagatccaagcataagacg

SEQ ID NO: 1864 - DNA, 20 bp, Artificial Sequence
  Synthetic polynucleotide
gtgccacaaaaggaagttga

SEQ ID NO: 1865 - DNA, 20 bp, Artificial Sequence
  Synthetic polynucleotide
ttagctccaacccttcgatc

SEQ ID NO: 1866 - DNA, 20 bp, Artificial Sequence
  Synthetic polynucleotide
aagttcctaagtcaaacaga

SEQ ID NO: 1867 - DNA, 20 bp, Artificial Sequence
  Synthetic polynucleotide
gttgtacgtgacataaaggt

SEQ ID NO: 1868 - DNA, 20 bp, Artificial Sequence
  Synthetic polynucleotide
atagggcaattgaattgagg

SEQ ID NO: 1869 - DNA, 20 bp, Artificial Sequence
  Synthetic polynucleotide
tctagtccccacacctttct

SEQ ID NO: 1870 - DNA, 20 bp, Artificial Sequence
  Synthetic polynucleotide
ctcattcctggatgctttct

SEQ ID NO: 1871 - DNA, 20 bp, Artificial Sequence
  Synthetic polynucleotide
aatcagcttcttccacttca

SEQ ID NO: 1872 - DNA, 20 bp, Artificial Sequence
  Synthetic polynucleotide
taaccccgctttagttgtta

SEQ ID NO: 1873 - DNA, 20 bp, Artificial Sequence
  Synthetic polynucleotide
ttcgaaccctcctctaattc

SEQ ID NO: 1874 - DNA, 20 bp, Artificial Sequence
  Synthetic polynucleotide
gctaagctcctcatctttac

SEQ ID NO: 1875 - DNA, 20 bp, Artificial Sequence
  Synthetic polynucleotide
atgttgcagggatgtggtct

SEQ ID NO: 1876 - DNA, 20 bp, Artificial Sequence
  Synthetic polynucleotide
caaatccacctccatcgttg

SEQ ID NO: 1877 - DNA, 20 bp, Artificial Sequence
  Synthetic polynucleotide
cttggcccagaagctaggtg

SEQ ID NO: 1878 - DNA, 20 bp, Artificial Sequence
  Synthetic polynucleotide
aggggacttacatagtacaa

SEQ ID NO: 1879 - DNA, 20 bp, Artificial Sequence
  Synthetic polynucleotide
gaagttcagaacagtaaggt

SEQ ID NO: 1880 - DNA, 20 bp, Artificial Sequence
  Synthetic polynucleotide
aatctccgttaaggtccaat

SEQ ID NO: 1881 - DNA, 20 bp, Artificial Sequence
  Synthetic polynucleotide
gtaactcaatccacgacaac

SEQ ID NO: 1882 - DNA, 20 bp, Artificial Sequence
  Synthetic polynucleotide
cagtaccggagacatagagg

SEQ ID NO: 1883 - DNA, 20 bp, Artificial Sequence
  Synthetic polynucleotide
aaagggctctagaaagtgag

SEQ ID NO: 1884 - DNA, 20 bp, Artificial Sequence
  Synthetic polynucleotide
ctggggcgagtcgtgattct

SEQ ID NO: 1885 - DNA, 20 bp, Artificial Sequence
  Synthetic polynucleotide
agaggccggtcacgagttct

SEQ ID NO: 1886 - DNA, 20 bp, Artificial Sequence
  Synthetic polynucleotide
acatggcgcatctgatcttt

SEQ ID NO: 1887 - DNA, 20 bp, Artificial Sequence
  Synthetic polynucleotide
gtgcatcctcatcggttcct

SEQ ID NO: 1888 - DNA, 20 bp, Artificial Sequence
  Synthetic polynucleotide
gcgctccgtaatcagcctct

SEQ ID NO: 1889 - DNA, 20 bp, Artificial Sequence
  Synthetic polynucleotide
gggaatccctaaggtcatta

SEQ ID NO: 1890 - DNA, 20 bp, Artificial Sequence
  Synthetic polynucleotide
cgcttgcggggattaggtca

SEQ ID NO: 1891 - DNA, 20 bp, Artificial Sequence
  Synthetic polynucleotide
ctgcggcagcgggttgtcac

SEQ ID NO: 1892 - DNA, 20 bp, Artificial Sequence
  Synthetic polynucleotide
actcttctcctcgagatgtc

SEQ ID NO: 1893 - DNA, 20 bp, Artificial Sequence
  Synthetic polynucleotide
tccgccctaatagtagcgtc

SEQ ID NO: 1894 - DNA, 20 bp, Artificial Sequence
  Synthetic polynucleotide
gggcgccgccttcatactgt

SEQ ID NO: 1895 - DNA, 20 bp, Artificial Sequence
  Synthetic polynucleotide
ttatcgcgaggccccgttgt

SEQ ID NO: 1896 - DNA, 20 bp, Artificial Sequence
  Synthetic polynucleotide
ggatgactgatactcccggg

SEQ ID NO: 1897 - DNA, 20 bp, Artificial Sequence
  Synthetic polynucleotide
gactggcgacggatatccgt

SEQ ID NO: 1898 - DNA, 20 bp, Artificial Sequence
  Synthetic polynucleotide
ggctcactactgaccaacgg

SEQ ID NO: 1899 - DNA, 20 bp, Artificial Sequence
  Synthetic polynucleotide
cctcgccccgcgtcctagct

SEQ ID NO: 1900 - DNA, 20 bp, Artificial Sequence
  Synthetic polynucleotide
ggacggcccgcttgcttact

SEQ ID NO: 1901 - DNA, 20 bp, Artificial Sequence
  Synthetic polynucleotide
ctgaggctgtttggtttgca

SEQ ID NO: 1902 - DNA, 20 bp, Artificial Sequence
  Synthetic polynucleotide
aggtgaccgtcgggtgctct

SEQ ID NO: 1903 - DNA, 20 bp, Artificial Sequence
  Synthetic polynucleotide
agcttcctggccgctcgcca

SEQ ID NO: 1904 - DNA, 20 bp, Artificial Sequence
  Synthetic polynucleotide
gcagggcccccccaaaattg

SEQ ID NO: 1905 - DNA, 20 bp, Artificial Sequence
  Synthetic polynucleotide
gacgcacgcgcgaacgattt

SEQ ID NO: 1906 - DNA, 20 bp, Artificial Sequence
  Synthetic polynucleotide
tccgcccgcacgccccgaat

SEQ ID NO: 1907 - DNA, 20 bp, Artificial Sequence
  Synthetic polynucleotide
gggaagccggagctcggcac

SEQ ID NO: 1908 - DNA, 20 bp, Artificial Sequence
  Synthetic polynucleotide
caccagcctggttgagtcgc

SEQ ID NO: 1909 - DNA, 20 bp, Artificial Sequence
  Synthetic polynucleotide
ccggagccgatgtcagcgaa

SEQ ID NO: 1910 - DNA, 20 bp, Artificial Sequence
  Synthetic polynucleotide
gcaggtctacccgctccaga

SEQ ID NO: 1911 - DNA, 20 bp, Artificial Sequence
  Synthetic polynucleotide
atccaacgagtaacgtgcag

SEQ ID NO: 1912 - DNA, 20 bp, Artificial Sequence
  Synthetic polynucleotide
actcgaccagagtgccagac

SEQ ID NO: 1913 - DNA, 20 bp, Artificial Sequence
  Synthetic polynucleotide
ggcctgcccctatgaacggc

SEQ ID NO: 1914 - DNA, 20 bp, Artificial Sequence
  Synthetic polynucleotide
attaatcaaatccgttattt

SEQ ID NO: 1915 - DNA, 20 bp, Artificial Sequence
  Synthetic polynucleotide
gaattgctttactttcttta

SEQ ID NO: 1916 - DNA, 20 bp, Artificial Sequence
  Synthetic polynucleotide
tattaccactttattaattg

SEQ ID NO: 1917 - DNA, 20 bp, Artificial Sequence
  Synthetic polynucleotide
agatgacctgaaaaaaattt

SEQ ID NO: 1918 - DNA, 20 bp, Artificial Sequence
  Synthetic polynucleotide
tctctccttaaaaaataaag

SEQ ID NO: 1919 - DNA, 20 bp, Artificial Sequence
  Synthetic polynucleotide
ttgtggcatttgtagaaata

SEQ ID NO: 1920 - DNA, 20 bp, Artificial Sequence
  Synthetic polynucleotide
ttggggcagaagtaaaaaat

SEQ ID NO: 1921 - DNA, 20 bp, Artificial Sequence
  Synthetic polynucleotide
ctgggtcaatagtaagttat

SEQ ID NO: 1922 - DNA, 20 bp, Artificial Sequence
  Synthetic polynucleotide
agaatacaccactaaaaaag

SEQ ID NO: 1923 - DNA, 20 bp, Artificial Sequence
  Synthetic polynucleotide
agattacgaggtaaaactag

SEQ ID NO: 1924 - DNA, 20 bp, Artificial Sequence
  Synthetic polynucleotide
gttagtcttaaaaaaacaag

SEQ ID NO: 1925 - DNA, 20 bp, Artificial Sequence
  Synthetic polynucleotide
cttgttcacaaaaaaaatga

SEQ ID NO: 1926 - DNA, 20 bp, Artificial Sequence
  Synthetic polynucleotide
gggtttctaaaaacgaaggg

SEQ ID NO: 1927 - DNA, 20 bp, Artificial Sequence
  Synthetic polynucleotide
agtagacagttaaaaaacga

SEQ ID NO: 1928 - DNA, 20 bp, Artificial Sequence
  Synthetic polynucleotide
tgcaaacgagaaaatcgaag

SEQ ID NO: 1929 - DNA, 20 bp, Artificial Sequence
  Synthetic polynucleotide
ccttagcatactaattatat

SEQ ID NO: 1930 - DNA, 20 bp, Artificial Sequence
  Synthetic polynucleotide
tgggggctgtgcataattat

SEQ ID NO: 1931 - DNA, 20 bp, Artificial Sequence
  Synthetic polynucleotide
ggaattcatgtttcttattg

SEQ ID NO: 1932 - DNA, 20 bp, Artificial Sequence
  Synthetic polynucleotide
ttgcatcaacaatcatcttt

SEQ ID NO: 1933 - DNA, 20 bp, Artificial Sequence
  Synthetic polynucleotide
aaaaaccgcataaataaaac

SEQ ID NO: 1934 - DNA, 20 bp, Artificial Sequence
  Synthetic polynucleotide
cgagggcataaaaaaaatac

SEQ ID NO: 1935 - DNA, 20 bp, Artificial Sequence
  Synthetic polynucleotide
agaactcccctacttaaaga

SEQ ID NO: 1936 - DNA, 20 bp, Artificial Sequence
  Synthetic polynucleotide
gatgagcaaacaaagcaata

SEQ ID NO: 1937 - DNA, 20 bp, Artificial Sequence
  Synthetic polynucleotide
agatgactcccgaagaaaat

SEQ ID NO: 1938 - DNA, 20 bp, Artificial Sequence
  Synthetic polynucleotide
agatgccggtaatttgtgaa

SEQ ID NO: 1939 - DNA, 20 bp, Artificial Sequence
  Synthetic polynucleotide
aagtcactaaaatccaagaa

SEQ ID NO: 1940 - DNA, 20 bp, Artificial Sequence
  Synthetic polynucleotide
aaaaacccgtactgagcaaa

SEQ ID NO: 1941 - DNA, 20 bp, Artificial Sequence
  Synthetic polynucleotide
tacatccaagtataaagtgg

SEQ ID NO: 1942 - DNA, 20 bp, Artificial Sequence
  Synthetic polynucleotide
aacaaccttaaaacccccga

SEQ ID NO: 1943 - DNA, 20 bp, Artificial Sequence
  Synthetic polynucleotide
gcagtacgagatgactgcgt

SEQ ID NO: 1944 - DNA, 20 bp, Artificial Sequence
  Synthetic polynucleotide
tagttccaacttgcctttcg

SEQ ID NO: 1945 - DNA, 20 bp, Artificial Sequence
  Synthetic polynucleotide
gcttggctgtctaattattt

SEQ ID NO: 1946 - DNA, 20 bp, Artificial Sequence
  Synthetic polynucleotide
gggtggctcgtttcttattg

SEQ ID NO: 1947 - DNA, 20 bp, Artificial Sequence
  Synthetic polynucleotide
ggggtacggctttcgttctg

SEQ ID NO: 1948 - DNA, 20 bp, Artificial Sequence
  Synthetic polynucleotide
aaaggccgtcgtttattcta

SEQ ID NO: 1949 - DNA, 20 bp, Artificial Sequence
  Synthetic polynucleotide
gctttacatcctgtacttag

SEQ ID NO: 1950 - DNA, 20 bp, Artificial Sequence
  Synthetic polynucleotide
tggggccgttcttatccaat

SEQ ID NO: 1951 - DNA, 20 bp, Artificial Sequence
  Synthetic polynucleotide
tctggactcgcggaaaacta

SEQ ID NO: 1952 - DNA, 20 bp, Artificial Sequence
  Synthetic polynucleotide
tggatactcttgccgaaggg

SEQ ID NO: 1953 - DNA, 20 bp, Artificial Sequence
  Synthetic polynucleotide
attaccctacacagagtctc

SEQ ID NO: 1954 - DNA, 20 bp, Artificial Sequence
  Synthetic polynucleotide
aaggagcgagcatttagggt

SEQ ID NO: 1955 - DNA, 20 bp, Artificial Sequence
  Synthetic polynucleotide
gggactcacaaaaactggag

SEQ ID NO: 1956 - DNA, 20 bp, Artificial Sequence
  Synthetic polynucleotide
ttgcgacgaagagactgcgg

SEQ ID NO: 1957 - DNA, 20 bp, Artificial Sequence
  Synthetic polynucleotide
gaagagctgatatgcacaag

SEQ ID NO: 1958 - DNA, 20 bp, Artificial Sequence
  Synthetic polynucleotide
tacggccagagatagagggt

SEQ ID NO: 1959 - DNA, 20 bp, Artificial Sequence
  Synthetic polynucleotide
ggtacgcggggtgctaattt

SEQ ID NO: 1960 - DNA, 20 bp, Artificial Sequence
  Synthetic polynucleotide
aggcagctctccgaatttca

SEQ ID NO: 1961 - DNA, 20 bp, Artificial Sequence
  Synthetic polynucleotide
atggagccccccctttctct

SEQ ID NO: 1962 - DNA, 20 bp, Artificial Sequence
  Synthetic polynucleotide
gttggtctggtactcgccca

SEQ ID NO: 1963 - DNA, 20 bp, Artificial Sequence
  Synthetic polynucleotide
gtaggtcatcccgtgcattt

SEQ ID NO: 1964 - DNA, 20 bp, Artificial Sequence
  Synthetic polynucleotide
ctccccccatgcgagtatat

SEQ ID NO: 1965 - DNA, 20 bp, Artificial Sequence
  Synthetic polynucleotide
ggggtccgtccccatcacac

SEQ ID NO: 1966 - DNA, 20 bp, Artificial Sequence
  Synthetic polynucleotide
ggctatccgttccgtgcgaa

SEQ ID NO: 1967 - DNA, 20 bp, Artificial Sequence
  Synthetic polynucleotide
tcggggctcatgccagtaac

SEQ ID NO: 1968 - DNA, 20 bp, Artificial Sequence
  Synthetic polynucleotide
atgggtccggacattgatag

SEQ ID NO: 1969 - DNA, 20 bp, Artificial Sequence
  Synthetic polynucleotide
cgctagcatgaactacccag

SEQ ID NO: 1970 - DNA, 20 bp, Artificial Sequence
  Synthetic polynucleotide
gttcaaccccgatccgttgc

SEQ ID NO: 1971 - DNA, 20 bp, Artificial Sequence
  Synthetic polynucleotide
ggtacccctacacgcacggg

SEQ ID NO: 1972 - DNA, 20 bp, Artificial Sequence
  Synthetic polynucleotide
tacggacgactcttaaccag

SEQ ID NO: 1973 - DNA, 20 bp, Artificial Sequence
  Synthetic polynucleotide
tatccgcgagaatagacacc

SEQ ID NO: 1974 - DNA, 20 bp, Artificial Sequence
  Synthetic polynucleotide
tcgcggccaccaccagttct

SEQ ID NO: 1975 - DNA, 20 bp, Artificial Sequence
  Synthetic polynucleotide
gtcgctcggatcacgcgcct

SEQ ID NO: 1976 - DNA, 20 bp, Artificial Sequence
  Synthetic polynucleotide
cgggctctgactctgtattt

SEQ ID NO: 1977 - DNA, 20 bp, Artificial Sequence
  Synthetic polynucleotide
gctcgcccagctcgagtttg

SEQ ID NO: 1978 - DNA, 20 bp, Artificial Sequence
  Synthetic polynucleotide
ccttgtccgcggcgattatg

SEQ ID NO: 1979 - DNA, 20 bp, Artificial Sequence
  Synthetic polynucleotide
tcagcacggggtctttcttg

SEQ ID NO: 1980 - DNA, 20 bp, Artificial Sequence
  Synthetic polynucleotide
ggagggccgatctaaactat

SEQ ID NO: 1981 - DNA, 20 bp, Artificial Sequence
  Synthetic polynucleotide
gggcgtcgccggcgctcgag

SEQ ID NO: 1982 - DNA, 20 bp, Artificial Sequence
  Synthetic polynucleotide
cgggggccgcggactctgta

SEQ ID NO: 1983 - DNA, 20 bp, Artificial Sequence
  Synthetic polynucleotide
agaccccctccccaacggat

SEQ ID NO: 1984 - DNA, 20 bp, Artificial Sequence
  Synthetic polynucleotide
ggcccgccccattgaagcgg

SEQ ID NO: 1985 - DNA, 20 bp, Artificial Sequence
  Synthetic polynucleotide
tggctaccaccccgtcggac

SEQ ID NO: 1986 - DNA, 20 bp, Artificial Sequence
  Synthetic polynucleotide
gtagatccagccacccacgg

SEQ ID NO: 1987 - DNA, 20 bp, Artificial Sequence
  Synthetic polynucleotide
ggcacccccatcaatccagg

SEQ ID NO: 1988 - DNA, 20 bp, Artificial Sequence
  Synthetic polynucleotide
ggagagcaactaacaccagt

SEQ ID NO: 1989 - DNA, 20 bp, Artificial Sequence
  Synthetic polynucleotide
gctgatgtagtcactcttga

SEQ ID NO: 1990 - DNA, 20 bp, Artificial Sequence
  Synthetic polynucleotide
agatgcaggctgcagatgcc

SEQ ID NO: 1991 - DNA, 20 bp, Artificial Sequence
  Synthetic polynucleotide
ggccctcggcggcggctccc

SEQ ID NO: 1992 - DNA, 20 bp, Artificial Sequence
  Synthetic polynucleotide
acagaacatgttgttataga

SEQ ID NO: 1993 - DNA, 20 bp, Artificial Sequence
  Synthetic polynucleotide
acagattctggaaagctcct

SEQ ID NO: 1994 - DNA, 20 bp, Artificial Sequence
  Synthetic polynucleotide
ggtcaacaagtggaactcta

SEQ ID NO: 1995 - DNA, 20 bp, Artificial Sequence
  Synthetic polynucleotide
ggagtatttcaggggctctt

SEQ ID NO: 1996 - DNA, 20 bp, Artificial Sequence
  Synthetic polynucleotide
gggagggctgtgctgctagt

SEQ ID NO: 1997 - DNA, 20 bp, Artificial Sequence
  Synthetic polynucleotide
gcaacttgaaattatatctg

SEQ ID NO: 1998 - DNA, 20 bp, Artificial Sequence
  Synthetic polynucleotide
gtagagaaagaagcagtgcc

SEQ ID NO: 1999 - DNA, 20 bp, Artificial Sequence
  Synthetic polynucleotide
ataggagaagatgatgtata

SEQ ID NO: 2000 - DNA, 20 bp, Artificial Sequence
  Synthetic polynucleotide
gcatacagtgatttgatgaa

SEQ ID NO: 2001 - DNA, 20 bp, Artificial Sequence
  Synthetic polynucleotide
gggggccctcctcttgctgc

SEQ ID NO: 2002 - DNA, 20 bp, Artificial Sequence
  Synthetic polynucleotide
gaaaatcatcagttatcatc

SEQ ID NO: 2003 - DNA, 20 bp, Artificial Sequence
  Synthetic polynucleotide
ttcatgagtcttgacaacaa

SEQ ID NO: 2004 - DNA, 20 bp, Artificial Sequence
  Synthetic polynucleotide
ggtggcgggcactgtcgtca

SEQ ID NO: 2005 - DNA, 20 bp, Artificial Sequence
  Synthetic polynucleotide
atgacagtgccaaagccagc

SEQ ID NO: 2006 - DNA, 20 bp, Artificial Sequence
  Synthetic polynucleotide
acagtagaactaagggtggg

SEQ ID NO: 2007 - DNA, 20 bp, Artificial Sequence
  Synthetic polynucleotide
ccgccgtccaagacctaccg

SEQ ID NO: 2008 - DNA, 20 bp, Artificial Sequence
  Synthetic polynucleotide
gggctgtcaggtccttgggg

SEQ ID NO: 2009 - DNA, 20 bp, Artificial Sequence
  Synthetic polynucleotide
accatgagtaactccattcc

SEQ ID NO: 2010 - DNA, 20 bp, Artificial Sequence
  Synthetic polynucleotide
ggaggtagagattcatgtca

SEQ ID NO: 2011 - DNA, 20 bp, Artificial Sequence
  Synthetic polynucleotide
gaacgaatacagaaaagtaa

SEQ ID NO: 2012 - DNA, 20 bp, Artificial Sequence
  Synthetic polynucleotide
atccgtggcccatcatgtct

SEQ ID NO: 2013 - DNA, 20 bp, Artificial Sequence
  Synthetic polynucleotide
ggtggacaagcggcagatag

SEQ ID NO: 2014 - DNA, 20 bp, Artificial Sequence
  Synthetic polynucleotide
gaactgcaaagtgaaacaaa

SEQ ID NO: 2015 - DNA, 20 bp, Artificial Sequence
  Synthetic polynucleotide
actgacacgcagacattcag

SEQ ID NO: 2016 - DNA, 20 bp, Artificial Sequence
  Synthetic polynucleotide
cgaagctggaatctgctctc

SEQ ID NO: 2017 - DNA, 20 bp, Artificial Sequence
  Synthetic polynucleotide
gaccagccggggcagtgaag

SEQ ID NO: 2018 - DNA, 20 bp, Artificial Sequence
  Synthetic polynucleotide
gagtatctggtaccccagca

SEQ ID NO: 2019 - DNA, 20 bp, Artificial Sequence
  Synthetic polynucleotide
ctgggcaggcgacccgccgc

SEQ ID NO: 2020 - DNA, 20 bp, Artificial Sequence
  Synthetic polynucleotide
gttctccacggcacccccaa

SEQ ID NO: 2021 - DNA, 20 bp, Artificial Sequence
  Synthetic polynucleotide
gagaaagaataccatgcaga

SEQ ID NO: 2022 - DNA, 20 bp, Artificial Sequence
  Synthetic polynucleotide
ctcctcctctgctccgccac

SEQ ID NO: 2023 - DNA, 20 bp, Artificial Sequence
  Synthetic polynucleotide
gctcaggaggaggaagccgg

SEQ ID NO: 2024 - DNA, 20 bp, Artificial Sequence
  Synthetic polynucleotide
gctgaggaggggtcgcggcg

SEQ ID NO: 2025 - DNA, 20 bp, Artificial Sequence
  Synthetic polynucleotide
caagctgtttgccaaagagg

SEQ ID NO: 2026 - DNA, 20 bp, Artificial Sequence
  Synthetic polynucleotide
gcacgcagcggcgggagccc

SEQ ID NO: 2027 - DNA, 20 bp, Artificial Sequence
  Synthetic polynucleotide
ggcccccaagtggacagagc

SEQ ID NO: 2028 - DNA, 20 bp, Artificial Sequence
  Synthetic polynucleotide
ggaagggctaggcgggggcg

SEQ ID NO: 2029 - DNA, 20 bp, Artificial Sequence
  Synthetic polynucleotide
gcaaataaccttctgtgtca

SEQ ID NO: 2030 - DNA, 20 bp, Artificial Sequence
  Synthetic polynucleotide
gcaccaagtctgagtggacc

SEQ ID NO: 2031 - DNA, 20 bp, Artificial Sequence
  Synthetic polynucleotide
gcaggactcctttcctccat

SEQ ID NO: 2032 - DNA, 20 bp, Artificial Sequence
  Synthetic polynucleotide
gctgcgcctctgctgcgcct

SEQ ID NO: 2033 - DNA, 20 bp, Artificial Sequence
  Synthetic polynucleotide
gaagccagctgattataaga

SEQ ID NO: 2034 - DNA, 20 bp, Artificial Sequence
  Synthetic polynucleotide
ccaaaaaagaactgcacctc

SEQ ID NO: 2035 - DNA, 20 bp, Artificial Sequence
  Synthetic polynucleotide
gttcgactacgtggagaagc

SEQ ID NO: 2036 - DNA, 20 bp, Artificial Sequence
  Synthetic polynucleotide
cgaccaaagcgcctgaggac

SEQ ID NO: 2037 - DNA, 20 bp, Artificial Sequence
  Synthetic polynucleotide
cctggccacagcctacatcc

SEQ ID NO: 2038 - DNA, 20 bp, Artificial Sequence
  Synthetic polynucleotide
ggcactgacaatcccctttc

SEQ ID NO: 2039 - DNA, 20 bp, Artificial Sequence
  Synthetic polynucleotide
gaggagctccaagaagactg

SEQ ID NO: 2040 - DNA, 20 bp, Artificial Sequence
  Synthetic polynucleotide
gaagaagacaaatcacaaac

SEQ ID NO: 2041 - DNA, 20 bp, Artificial Sequence
  Synthetic polynucleotide
ggggcgggaagagcgcgtcc

SEQ ID NO: 2042 - DNA, 20 bp, Artificial Sequence
  Synthetic polynucleotide
ctcgtctgataagacaacag

SEQ ID NO: 2043 - DNA, 20 bp, Artificial Sequence
  Synthetic polynucleotide
gtgaatagagccagcaaagg

SEQ ID NO: 2044 - DNA, 20 bp, Artificial Sequence
  Synthetic polynucleotide
gactcgcagacgccctctgc

SEQ ID NO: 2045 - DNA, 20 bp, Artificial Sequence
  Synthetic polynucleotide
ttgtcgtcttctgtccaagt

SEQ ID NO: 2046 - DNA, 20 bp, Artificial Sequence
  Synthetic polynucleotide
gaggcgcagcagtgccacag

SEQ ID NO: 2047 - DNA, 20 bp, Artificial Sequence
  Synthetic polynucleotide
ggccatggcgggctggatcc

SEQ ID NO: 2048 - DNA, 20 bp, Artificial Sequence
  Synthetic polynucleotide
gagccaagatggggctctgc

SEQ ID NO: 2049 - DNA, 20 bp, Artificial Sequence
  Synthetic polynucleotide
gggtggggggagtttgctcc

SEQ ID NO: 2050 - DNA, 20 bp, Artificial Sequence
  Synthetic polynucleotide
gccgaggctgctggaggaag

SEQ ID NO: 2051 - DNA, 20 bp, Artificial Sequence
  Synthetic polynucleotide
gcaaaactcaaccctacccc

SEQ ID NO: 2052 - DNA, 20 bp, Artificial Sequence
  Synthetic polynucleotide
gaatccatcttcctgaccct

SEQ ID NO: 2053 - DNA, 20 bp, Artificial Sequence
  Synthetic polynucleotide
ctaggtgatgatgtcagatt

SEQ ID NO: 2054 - DNA, 20 bp, Artificial Sequence
  Synthetic polynucleotide
gagcagagatgtgggaatgg

SEQ ID NO: 2055 - DNA, 20 bp, Artificial Sequence
  Synthetic polynucleotide
gggactggggtcgggagggt

SEQ ID NO: 2056 - DNA, 20 bp, Artificial Sequence
  Synthetic polynucleotide
gagaaagctggagaaggggg

SEQ ID NO: 2057 - DNA, 20 bp, Artificial Sequence
  Synthetic polynucleotide
gcgcagggaagcgaccaact

SEQ ID NO: 2058 - DNA, 20 bp, Artificial Sequence
  Synthetic polynucleotide
gaagagggggagagagttac

SEQ ID NO: 2059 - DNA, 20 bp, Artificial Sequence
  Synthetic polynucleotide
gtggaagagtttgtggaagg

SEQ ID NO: 2060 - DNA, 20 bp, Artificial Sequence
  Synthetic polynucleotide
agttcccagctgcacgcctc

SEQ ID NO: 2061 - DNA, 20 bp, Artificial Sequence
  Synthetic polynucleotide
gaagagggaaacgtgtggct

SEQ ID NO: 2062 - DNA, 20 bp, Artificial Sequence
  Synthetic polynucleotide
ggtgggtctcgggactggca

SEQ ID NO: 2063 - DNA, 20 bp, Artificial Sequence
  Synthetic polynucleotide
gaatgagggtcctttgggaa

SEQ ID NO: 2064 - DNA, 20 bp, Artificial Sequence
  Synthetic polynucleotide
ggtgggggcggaagggggcc

SEQ ID NO: 2065 - DNA, 20 bp, Artificial Sequence
  Synthetic polynucleotide
cggccagagaccgagcccta

SEQ ID NO: 2066 - DNA, 20 bp, Artificial Sequence
  Synthetic polynucleotide
gttgtggcagcagtcactgg

SEQ ID NO: 2067 - DNA, 20 bp, Artificial Sequence
  Synthetic polynucleotide
caacagcagcagccacctgg

SEQ ID NO: 2068 - DNA, 20 bp, Artificial Sequence
  Synthetic polynucleotide
ggagccagcccctggccttc

SEQ ID NO: 2069 - DNA, 20 bp, Artificial Sequence
  Synthetic polynucleotide
tcccaaaggcggagggcgtt

SEQ ID NO: 2070 - DNA, 20 bp, Artificial Sequence
  Synthetic polynucleotide
tgagtccgagcagaagaaga

SEQ ID NO: 2071 - DNA, 20 bp, Artificial Sequence
  Synthetic polynucleotide
gagtccgagcagaagaagaa

SEQ ID NO: 2072 - DNA, 20 bp, Artificial Sequence
  Synthetic polynucleotide
ggcagccagcatgatgagac

SEQ ID NO: 2073 - DNA, 20 bp, Artificial Sequence
  Synthetic polynucleotide
cttctttgcttgttcaaatg

SEQ ID NO: 2074 - DNA, 20 bp, Artificial Sequence
  Synthetic polynucleotide
gcagggtgagtgtctcagcc

SEQ ID NO: 2075 - DNA, 20 bp, Artificial Sequence
  Synthetic polynucleotide
gaactgtgtgtgttgcaggg

SEQ ID NO: 2076 - DNA, 20 bp, Artificial Sequence
  Synthetic polynucleotide
gggctgagagagggacaagt

SEQ ID NO: 2077 - DNA, 20 bp, Artificial Sequence
  Synthetic polynucleotide
aaaacgtttccaagacatga

SEQ ID NO: 2078 - DNA, 20 bp, Artificial Sequence
  Synthetic polynucleotide
ccacgcccgcggggtgaagt

SEQ ID NO: 2079 - DNA, 20 bp, Artificial Sequence
  Synthetic polynucleotide
gcttgcagatggccatggcg

SEQ ID NO: 2080 - DNA, 20 bp, Artificial Sequence
  Synthetic polynucleotide
gaagcgcctggcagtgtacc

SEQ ID NO: 2081 - DNA, 20 bp, Artificial Sequence
  Synthetic polynucleotide
gtcatcttagtcattacctg

SEQ ID NO: 2082 - DNA, 20 bp, Artificial Sequence
  Synthetic polynucleotide
tgcccctccctccctggccc

SEQ ID NO: 2083 - DNA, 20 bp, Artificial Sequence
  Synthetic polynucleotide
agagccccccctcaaagaga

SEQ ID NO: 2084 - DNA, 20 bp, Artificial Sequence
  Synthetic polynucleotide
gagtccgagcagaagaagaa

SEQ ID NO: 2085 - DNA, 20 bp, Artificial Sequence
  Synthetic polynucleotide
ggaatcccttctgcagcacc

SEQ ID NO: 2086 - DNA, 20 bp, Artificial Sequence
  Synthetic polynucleotide
gaacacaaagcatagactgc

SEQ ID NO: 2087 - DNA, 20 bp, Artificial Sequence
  Synthetic polynucleotide
ggcccagactgagcacgtga

SEQ ID NO: 2088 - DNA, 20 bp, Artificial Sequence
  Synthetic polynucleotide
ggcactgcggctggaggtgg

SEQ ID NO: 2089 - DNA, 20 bp, Artificial Sequence
  Synthetic polynucleotide
agcagcagcagcagcagcag

SEQ ID NO: 2090 - DNA, 20 bp, Artificial Sequence
  Synthetic polynucleotide
atcagcagcagcagcagcag

SEQ ID NO: 2091 - DNA, 20 bp, Artificial Sequence
  Synthetic polynucleotide
agcagcagcagcagcagcag

SEQ ID NO: 2092 - DNA, 20 bp, Artificial Sequence
  Synthetic polynucleotide
agcagcagcagcagcagcag

SEQ ID NO: 2093 - DNA, 20 bp, Artificial Sequence
  Synthetic polynucleotide
gtccctcttgacagcagcag

SEQ ID NO: 2094 - DNA, 20 bp, Artificial Sequence
  Synthetic polynucleotide
cactggacatggaaatagag

SEQ ID NO: 2095 - DNA, 20 bp, Artificial Sequence
  Synthetic polynucleotide
gcaaatacgctatctgtagc

SEQ ID NO: 2096 - DNA, 20 bp, Artificial Sequence
  Synthetic polynucleotide
gcttttcttcaagctgccca

SEQ ID NO: 2097 - DNA, 20 bp, Artificial Sequence
  Synthetic polynucleotide
aaggaacgtgttttacccgg

SEQ ID NO: 2098 - DNA, 20 bp, Artificial Sequence
  Synthetic polynucleotide
cctgtgcgtcccccaggggc

SEQ ID NO: 2099 - DNA, 20 bp, Artificial Sequence
  Synthetic polynucleotide
cttaggcaagtaatgcaata

SEQ ID NO: 2100 - DNA, 20 bp, Artificial Sequence
  Synthetic polynucleotide
ggataacatcaaacacgtcc

SEQ ID NO: 2101 - DNA, 20 bp, Artificial Sequence
  Synthetic polynucleotide
tgcgactgcagaagatgacc

SEQ ID NO: 2102 - DNA, 20 bp, Artificial Sequence
  Synthetic polynucleotide
tgagtacgcataagcgacga

SEQ ID NO: 2103 - DNA, 20 bp, Artificial Sequence
  Synthetic polynucleotide
acaaggcgagcgtgggctgc

SEQ ID NO: 2104 - DNA, 20 bp, Artificial Sequence
  Synthetic polynucleotide
ctgtgagcgtgcccaggggc

SEQ ID NO: 2105 - DNA, 20 bp, Artificial Sequence
  Synthetic polynucleotide
gccagacactttgtgaagta

SEQ ID NO: 2106 - DNA, 20 bp, Artificial Sequence
  Synthetic polynucleotide
atatagacgcctctgctccc

SEQ ID NO: 2107 - DNA, 20 bp, Artificial Sequence
  Synthetic polynucleotide
acttttacagtattgaataa

SEQ ID NO: 2108 - DNA, 20 bp, Artificial Sequence
  Synthetic polynucleotide
acatacatccctctggacat

SEQ ID NO: 2109 - DNA, 20 bp, Artificial Sequence
  Synthetic polynucleotide
acatacatccctctggacat

SEQ ID NO: 2110 - DNA, 20 bp, Artificial Sequence
  Synthetic polynucleotide
ctgatacagttttcagggcc

SEQ ID NO: 2111 - DNA, 20 bp, Artificial Sequence
  Synthetic polynucleotide
tctttactgtttaagccaac

SEQ ID NO: 2112 - DNA, 20 bp, Artificial Sequence
  Synthetic polynucleotide
acttacagcttcttgtctcc

SEQ ID NO: 2113 - DNA, 20 bp, Artificial Sequence
  Synthetic polynucleotide
tgatggcagttaatgagctc

SEQ ID NO: 2114 - DNA, 20 bp, Artificial Sequence
  Synthetic polynucleotide
aaatgcttcctgtacacctg

SEQ ID NO: 2115 - DNA, 20 bp, Artificial Sequence
  Synthetic polynucleotide
gctgatcttcagcctccttt

SEQ ID NO: 2116 - DNA, 20 bp, Artificial Sequence
  Synthetic polynucleotide
gtggttcggcatcatagtgc

SEQ ID NO: 2117 - DNA, 55 bp, Artificial Sequence
  Synthetic polynucleotide
gtgctcttaactttcactttatagatttatagggttaataaatgggaatttatat

SEQ ID NO: 2118 - DNA, 55 bp, Artificial Sequence
  Synthetic polynucleotide
cctttgtaccaatcctctaaatagttaaataggaaggataacccaagatcaaaat

SEQ ID NO: 2119 - DNA, 55 bp, Artificial Sequence
  Synthetic polynucleotide
gtaaaagttaaaatatctttaacctaaaaccgggttcagcgacttatttagtcca

SEQ ID NO: 2120 - DNA, 55 bp, Artificial Sequence
  Synthetic polynucleotide
actgttaaattgtcatctttatgcttaaagaggcttaagttacttcaatctacta

SEQ ID NO: 2121 - DNA, 55 bp, Artificial Sequence
  Synthetic polynucleotide
gatattataatttaagcacagcaaggctcttggctagaattatacctagtacata

SEQ ID NO: 2122 - DNA, 55 bp, Artificial Sequence
  Synthetic polynucleotide
tcattctaattcttatcttgcaaggcttcaaggtcatatacgtatttattgtcac

SEQ ID NO: 2123 - DNA, 55 bp, Artificial Sequence
  Synthetic polynucleotide
catagaaacctccgctctacaatatgtatgtggaaataagaaattttacctacta

SEQ ID NO: 2124 - DNA, 55 bp, Artificial Sequence
  Synthetic polynucleotide
cttatatactacctcccatactggtacttctggataaaaaagaatatattggtat

SEQ ID NO: 2125 - DNA, 55 bp, Artificial Sequence
  Synthetic polynucleotide
cttacatactaacaatcctgcatacgaatacgggtttgttattaatcagataatg

SEQ ID NO: 2126 - DNA, 55 bp, Artificial Sequence
  Synthetic polynucleotide
aaaacaaaaaaccatccgttaatgtagcgtaggtttgacaactcatttatcaatt

SEQ ID NO: 2127 - DNA, 55 bp, Artificial Sequence
  Synthetic polynucleotide
atatattagattaatacatgtaagtctgtcaggcaagaagttagaatagtaccag

SEQ ID NO: 2128 - DNA, 55 bp, Artificial Sequence
  Synthetic polynucleotide
gttaaagcaaaaaagactacggttctgatctggttttttaataagccaacgattt

SEQ ID NO: 2129 - DNA, 55 bp, Artificial Sequence
  Synthetic polynucleotide
ttaaaccttttgtgctcgaagctagcaagcaggtataattatttatatatatgac

SEQ ID NO: 2130 - DNA, 55 bp, Artificial Sequence
  Synthetic polynucleotide
aaaatttataaactttcaatccttcaccacggggacgataagcagaaaattaata

SEQ ID NO: 2131 - DNA, 55 bp, Artificial Sequence
  Synthetic polynucleotide
tatttttaaaacatcaccaaatagatgcgatggtttcttgcaatcacctaaaata

SEQ ID NO: 2132 - DNA, 55 bp, Artificial Sequence
  Synthetic polynucleotide
ggttactcgcacatatcaccttggtaaaattggttaagggtaagatcgaaatcaa

SEQ ID NO: 2133 - DNA, 55 bp, Artificial Sequence
  Synthetic polynucleotide
aaagatcgactactctcaacatggtaaaattggtattttccaaatccctactagg

SEQ ID NO: 2134 - DNA, 55 bp, Artificial Sequence
  Synthetic polynucleotide
aaatctggtctctggcctccttcaggatttaggaaaatacgtttttttaaaattg

SEQ ID NO: 2135 - DNA, 55 bp, Artificial Sequence
  Synthetic polynucleotide
tgctacaataatagaactttattccttcctggggagtcaaccagatagttagtcg

SEQ ID NO: 2136 - DNA, 55 bp, Artificial Sequence
  Synthetic polynucleotide
ctgtaactctacattacttatattacttactggtttggaaggaaggtacagaagg

SEQ ID NO: 2137 - DNA, 55 bp, Artificial Sequence
  Synthetic polynucleotide
cgcgaaataatactgtccatagccttatagcggtaaggtcaaagttatatagtca

SEQ ID NO: 2138 - DNA, 55 bp, Artificial Sequence
  Synthetic polynucleotide
aggtgtaagaaggatgcacgaacttggatttggtaatagtatgtatcaatcgctt

SEQ ID NO: 2139 - DNA, 55 bp, Artificial Sequence
  Synthetic polynucleotide
caagctcataaaaatactcaacgtagatgtaggttcacttagcacctccacatct

SEQ ID NO: 2140 - DNA, 55 bp, Artificial Sequence
  Synthetic polynucleotide
agaacctcaagtacttctatcctaaattcctggatgatggaccaagtgatttcgt

SEQ ID NO: 2141 - DNA, 55 bp, Artificial Sequence
  Synthetic polynucleotide
atgaccaaaattcccacttaggaacgcattaggatgttgtgtattacacattaac

SEQ ID NO: 2142 - DNA, 55 bp, Artificial Sequence
  Synthetic polynucleotide
cgcgcttatatgatttcattatttgacagacgggaaaactcaaagattctcctag

SEQ ID NO: 2143 - DNA, 55 bp, Artificial Sequence
  Synthetic polynucleotide
taattacgatactgcaccagtatgacagtatggttaagcaatagtttcgaatccg

SEQ ID NO: 2144 - DNA, 55 bp, Artificial Sequence
  Synthetic polynucleotide
aaatgaacgataataactagaagcagacagtggtccttttaccacgttgaaactt

SEQ ID NO: 2145 - DNA, 55 bp, Artificial Sequence
  Synthetic polynucleotide
caaattatgatatattctcgtctaatacgtcggaaagagaaaggtgaacgttcct

SEQ ID NO: 2146 - DNA, 55 bp, Artificial Sequence
  Synthetic polynucleotide
taatcattcgacatagctttatgtccatgtcgggtaaggtaatagaaggggatac

SEQ ID NO: 2147 - DNA, 55 bp, Artificial Sequence
  Synthetic polynucleotide
cgaaaaaattacgatgcgcgaaggttattcaggttcttcatgtctcctccaccct

SEQ ID NO: 2148 - DNA, 55 bp, Artificial Sequence
  Synthetic polynucleotide
tttggtatacatttatcgctaacggatttctggattagttgccccacctctacac

SEQ ID NO: 2149 - DNA, 55 bp, Artificial Sequence
  Synthetic polynucleotide
gtgactgccaaaagcacaattcggataattcggttatcgtatagagaaatcggtc

SEQ ID NO: 2150 - DNA, 55 bp, Artificial Sequence
  Synthetic polynucleotide
taggaacaaaaccaggcaaagacactctctcggatagattgtatagtggtggtag

SEQ ID NO: 2151 - DNA, 55 bp, Artificial Sequence
  Synthetic polynucleotide
ctcgacagacaaaccacataaggaaatttgaggaacgtaactcacctcgataacc

SEQ ID NO: 2152 - DNA, 55 bp, Artificial Sequence
  Synthetic polynucleotide
cagcaatcctcacttcctagtggcaataattggcattgttgttgacatagatgct

SEQ ID NO: 2153 - DNA, 55 bp, Artificial Sequence
  Synthetic polynucleotide
tagcttagaccccagtcaaggtttattcaagggcggagaaataagctgtgctgaa

SEQ ID NO: 2154 - DNA, 55 bp, Artificial Sequence
  Synthetic polynucleotide
atgaacatcacaaacccgctgtctagctctaggtttttatgtcaatggggacagt

SEQ ID NO: 2155 - DNA, 55 bp, Artificial Sequence
  Synthetic polynucleotide
aaattgagctccctaacagtgctcttcgtgcggggagtttgtatacttggataca

SEQ ID NO: 2156 - DNA, 55 bp, Artificial Sequence
  Synthetic polynucleotide
tcggtcgcctttaacccctgagattggaattggaattctcgaatcaacctctgaa

SEQ ID NO: 2157 - DNA, 55 bp, Artificial Sequence
  Synthetic polynucleotide
gctcaaccttaaacatcgaataacgcgtagcggtgttagtactcccattttttga

SEQ ID NO: 2158 - DNA, 55 bp, Artificial Sequence
  Synthetic polynucleotide
cgtgatacaaatatcccaccgtggttcagatggttataagtatctccccacagca

SEQ ID NO: 2159 - DNA, 55 bp, Artificial Sequence
  Synthetic polynucleotide
ttaaaacatacctcaactatacatccgtgccggtaaattgtgtacgtgtgcgcct

SEQ ID NO: 2160 - DNA, 55 bp, Artificial Sequence
  Synthetic polynucleotide
gctggcgactcagattcaacacaagcctgccggttttatttgaaatgttaaaaac

SEQ ID NO: 2161 - DNA, 55 bp, Artificial Sequence
  Synthetic polynucleotide
gtagatatagttatatcatcagatcaccacgggctgcgtattaaggtgtagaagc

SEQ ID NO: 2162 - DNA, 55 bp, Artificial Sequence
  Synthetic polynucleotide
aggaaagttgcaccgtccgcgcggttaataaggttatataatcctgtgatgggtg

SEQ ID NO: 2163 - DNA, 55 bp, Artificial Sequence
  Synthetic polynucleotide
ggccgctttaactatgcatctggcctttaaagggccgataatcgaattgtctgcc

SEQ ID NO: 2164 - DNA, 55 bp, Artificial Sequence
  Synthetic polynucleotide
cactatactaccgacccctcagctatttcagggataaagttcgacatcgcgatac

SEQ ID NO: 2165 - DNA, 55 bp, Artificial Sequence
  Synthetic polynucleotide
tagccagctgtccccaccatccatggttatgggaaggaatagtaacgcgatacta

SEQ ID NO: 2166 - DNA, 55 bp, Artificial Sequence
  Synthetic polynucleotide
tcccattaccagtcttcgtctcagctagctggggattttggaatcgtctccgctt

SEQ ID NO: 2167 - DNA, 55 bp, Artificial Sequence
  Synthetic polynucleotide
cgcgaaattgacgtcgctttcagaatttcaggggtagtactggatgtgcaacact

SEQ ID NO: 2168 - DNA, 55 bp, Artificial Sequence
  Synthetic polynucleotide
cattagattgaatcttcccctgtttcctccaggggcaggaagagagcatgagagt

SEQ ID NO: 2169 - DNA, 55 bp, Artificial Sequence
  Synthetic polynucleotide
gccctcaccaactacgcccaaaccggctatgggctgacagtaattttttacaacc

SEQ ID NO: 2170 - DNA, 55 bp, Artificial Sequence
  Synthetic polynucleotide
ttttatgctcgataagcgattatggaatcatggacccacttccacgacccagcca

SEQ ID NO: 2171 - DNA, 55 bp, Artificial Sequence
  Synthetic polynucleotide
agcatacataaaacctctttcatacacgcacggggggagagattaagcgccgccc

SEQ ID NO: 2172 - DNA, 55 bp, Artificial Sequence
  Synthetic polynucleotide
gcggtgttggtgtccgcctactcaacacaacggagtattggtaaggttacgctgt

SEQ ID NO: 2173 - DNA, 55 bp, Artificial Sequence
  Synthetic polynucleotide
tgatgttatgagacatctgtgtacatacataggggctcggtcccctttcgcctcg

SEQ ID NO: 2174 - DNA, 55 bp, Artificial Sequence
  Synthetic polynucleotide
gtcccacgcaaaaagtcctcctttcaccacggggggagtgaatatgactagacgg

SEQ ID NO: 2175 - DNA, 55 bp, Artificial Sequence
  Synthetic polynucleotide
ttcaggatacccatcactcctaaagacgacgggtgttggcttcagtccatccgag

SEQ ID NO: 2176 - DNA, 55 bp, Artificial Sequence
  Synthetic polynucleotide
cacacattaaatcacccgaagtcctaccgaagggggcaatgcaaacgcagcgatt

SEQ ID NO: 2177 - DNA, 55 bp, Artificial Sequence
  Synthetic polynucleotide
agcaaccgccgaccagcccacacggaaattgggaatccgtgatgtgtcccccgtg

SEQ ID NO: 2178 - DNA, 55 bp, Artificial Sequence
  Synthetic polynucleotide
atcatcccccgaatccccctgattctcgctcggggggagcggcaaacgggagtta

SEQ ID NO: 2179 - DNA, 55 bp, Artificial Sequence
  Synthetic polynucleotide
tcccgaacgcgtagcactatctctgtctctggggggaaccagcgccgggcgcgcg

SEQ ID NO: 2180 - DNA, 55 bp, Artificial Sequence
  Synthetic polynucleotide
ggctagccgctcctatctccgaaccctgaacgggtgcgtagaagaggcaagcggt

SEQ ID NO: 2181 - DNA, 55 bp, Artificial Sequence
  Synthetic polynucleotide
gggcgcgagccctctgcagtaatttacttacggacgtggggccgggcggttggta

SEQ ID NO: 2182 - DNA, 55 bp, Artificial Sequence
  Synthetic polynucleotide
cccagaccgccttctaccttccagtcagtcgggtggctggctgggactggggggt

SEQ ID NO: 2183 - DNA, 55 bp, Artificial Sequence
  Synthetic polynucleotide
tcctctcgaatgccttcctcttccacacacggggtggacgcgtgggggaatgacc

SEQ ID NO: 2184 - DNA, 55 bp, Artificial Sequence
  Synthetic polynucleotide
acgtcattgcatccttctcaaaagacagacgggggagcggccggcgacggctgga

SEQ ID NO: 2185 - DNA, 55 bp, Artificial Sequence
  Synthetic polynucleotide
gccgggcgcgacgtccccactcgatgaagatggtagtaaaagctaccagctggcg

SEQ ID NO: 2186 - DNA, 55 bp, Artificial Sequence
  Synthetic polynucleotide
accaattcagttaagccacttaatcaccacggggagggtcgggggcggcgcctgc

SEQ ID NO: 2187 - DNA, 55 bp, Artificial Sequence
  Synthetic polynucleotide
gggctatctccacagtcgagcaattaccgagggcggactggggggttccggccgc

SEQ ID NO: 2188 - DNA, 55 bp, Artificial Sequence
  Synthetic polynucleotide
gaaccaacctcacactcccatcgatcccgatgggggggtgggtgtgcgaagttgc

SEQ ID NO: 2189 - DNA, 55 bp, Artificial Sequence
  Synthetic polynucleotide
acattgaaacaatactctgcgtgagtttagaggtattcgaaatacattactaagt

SEQ ID NO: 2190 - DNA, 55 bp, Artificial Sequence
  Synthetic polynucleotide
ttatacgtttacataacactccaatttaattgggtcgaatcagaagaggagaaat

SEQ ID NO: 2191 - DNA, 55 bp, Artificial Sequence
  Synthetic polynucleotide
attcattacatcaggtcactgctaataaataggttgtttatagatttcttctgga

SEQ ID NO: 2192 - DNA, 55 bp, Artificial Sequence
  Synthetic polynucleotide
tatcattatattcaaaccaaaagtaattaatgggcggcctgcatattacacattg

SEQ ID NO: 2193 - DNA, 55 bp, Artificial Sequence
  Synthetic polynucleotide
aaataccttaaaatttcagagaactactatgggaactctatagtttgttagttcc

SEQ ID NO: 2194 - DNA, 55 bp, Artificial Sequence
  Synthetic polynucleotide
gtaaaactacataaaactgcgcttggaatatggattttttaatccacaaatgtca

SEQ ID NO: 2195 - DNA, 55 bp, Artificial Sequence
  Synthetic polynucleotide
acgactcatctttcttctagaaggtcaaaagggaataaatatgtaataaagtgtt

SEQ ID NO: 2196 - DNA, 55 bp, Artificial Sequence
  Synthetic polynucleotide
tatatataaattaatacctttactaagaaggggcctcttcattccagatgattat

SEQ ID NO: 2197 - DNA, 55 bp, Artificial Sequence
  Synthetic polynucleotide
aatttttatcatatatcaaactagaaatgttggaaagtggggttccttaacgttc

SEQ ID NO: 2198 - DNA, 55 bp, Artificial Sequence
  Synthetic polynucleotide
taactacacttagattccctatattgcaattggttgtacataaatgtactcgaga

SEQ ID NO: 2199 - DNA, 55 bp, Artificial Sequence
  Synthetic polynucleotide
ctctaatctattaaatccaaccctatgatgaggagaagaataaaaatgcgtatac

SEQ ID NO: 2200 - DNA, 55 bp, Artificial Sequence
  Synthetic polynucleotide
tattattcagcctcgtctgaaattcgaaattggaacaagtagtatatatttcatg

SEQ ID NO: 2201 - DNA, 55 bp, Artificial Sequence
  Synthetic polynucleotide
tattaaacaaaattgtcactttaacccagccggtagttataaagtaatacggtaa

SEQ ID NO: 2202 - DNA, 55 bp, Artificial Sequence
  Synthetic polynucleotide
aaactgtcgtagtatccatatcaagaacgaaggttttttgtgtattatagaagaa

SEQ ID NO: 2203 - DNA, 55 bp, Artificial Sequence
  Synthetic polynucleotide
gttgttaatatacctccaggtattcacggttggaaaaaactataatcttacatat

SEQ ID NO: 2204 - DNA, 55 bp, Artificial Sequence
  Synthetic polynucleotide
aagcacccacttcaatcttagccctaattagggatagttaaacgagaattagtca

SEQ ID NO: 2205 - DNA, 55 bp, Artificial Sequence
  Synthetic polynucleotide
cttgtcagtgccacaaccaataatttatttaggtctgtgttgtgtttggctaact

SEQ ID NO: 2206 - DNA, 55 bp, Artificial Sequence
  Synthetic polynucleotide
tatggcaaccttataacgtttgcttatttatggatggatgaacaccggttgtcaa

SEQ ID NO: 2207 - DNA, 55 bp, Artificial Sequence
  Synthetic polynucleotide
gacatttatttagcaactggctttcaaacaagggtatcgagtagaagtgttctcg

SEQ ID NO: 2208 - DNA, 55 bp, Artificial Sequence
  Synthetic polynucleotide
ctatacgaattccgacccataggttatataaggtttaaacttgatccaaacccgg

SEQ ID NO: 2209 - DNA, 55 bp, Artificial Sequence
  Synthetic polynucleotide
taggtatacatccactcgatatggtagttttggtcttcaagttaaacacgactaa

SEQ ID NO: 2210 - DNA, 55 bp, Artificial Sequence
  Synthetic polynucleotide
gtcttccaaaaacaacctgtggcaggtatatggtcgttattcgttacactaattt

SEQ ID NO: 2211 - DNA, 55 bp, Artificial Sequence
  Synthetic polynucleotide
tctgtaaaaatcgacaccttaatataaccttggagcctcgctgggttctattgta

SEQ ID NO: 2212 - DNA, 55 bp, Artificial Sequence
  Synthetic polynucleotide
ggaaatttccaaaaggctattaagggtatccggtttttgatactcgatatattgg

SEQ ID NO: 2213 - DNA, 55 bp, Artificial Sequence
  Synthetic polynucleotide
cccatcaaattcacatcacatccaactaaccggtttgtatgtttgaggattactg

SEQ ID NO: 2214 - DNA, 55 bp, Artificial Sequence
  Synthetic polynucleotide
tcgaggatctctataacttatagtaccagttggtacagtttttgtttgcaaaagt

SEQ ID NO: 2215 - DNA, 55 bp, Artificial Sequence
  Synthetic polynucleotide
atacacgacgcaccaactcaatttgacgtttggattgtccatgttcgtaagttta

SEQ ID NO: 2216 - DNA, 55 bp, Artificial Sequence
  Synthetic polynucleotide
ttggaaaaggcgatctctgaataacacctgtggtaacagatttagttagtagcga

SEQ ID NO: 2217 - DNA, 55 bp, Artificial Sequence
  Synthetic polynucleotide
cacacaacttttacgcccctacgaacgagaagggactttttgttaatctaacatt

SEQ ID NO: 2218 - DNA, 55 bp, Artificial Sequence
  Synthetic polynucleotide
aatacaacccctgacacgacacttgatagatggaagcatatttatcagtattcat

SEQ ID NO: 2219 - DNA, 55 bp, Artificial Sequence
  Synthetic polynucleotide
gagccttgcctgtatacatcaactctttctggggagatgaggatgtttttgtagt

SEQ ID NO: 2220 - DNA, 55 bp, Artificial Sequence
  Synthetic polynucleotide
cagaccccttgccgtacactgttatttatttggatctaggaggtaacaacccatt

SEQ ID NO: 2221 - DNA, 55 bp, Artificial Sequence
  Synthetic polynucleotide
ccaactactcaaagagcacttccattaattagggggtgcgcactttcacttgact

SEQ ID NO: 2222 - DNA, 55 bp, Artificial Sequence
  Synthetic polynucleotide
cgtttagacttgtatacacataaattctttcggtgggtcgcagtgtggccagtga

SEQ ID NO: 2223 - DNA, 55 bp, Artificial Sequence
  Synthetic polynucleotide
ttttgtaccttctcaccaaatccatatatatggtacgagggaaacgagggacgga

SEQ ID NO: 2224 - DNA, 55 bp, Artificial Sequence
  Synthetic polynucleotide
cagaaactctcgtccacactcgggcaattgtggcttttaaagactaagttatcgg

SEQ ID NO: 2225 - DNA, 55 bp, Artificial Sequence
  Synthetic polynucleotide
cgaaaagtccgtccctctagcatcgggatatggttttgacaaatataaggagtct

SEQ ID NO: 2226 - DNA, 55 bp, Artificial Sequence
  Synthetic polynucleotide
acgactccaaaatatgcattatctacggctaggtctgttgtaggtggctagcaaa

SEQ ID NO: 2227 - DNA, 55 bp, Artificial Sequence
  Synthetic polynucleotide
acgatataaaccgactcgaatgggccaaattggtctaagaaggcacaacatgtga

SEQ ID NO: 2228 - DNA, 55 bp, Artificial Sequence
  Synthetic polynucleotide
tgacataatgatacttccaggtttatagcgaggttttaaagaaacgcccgccgtg

SEQ ID NO: 2229 - DNA, 55 bp, Artificial Sequence
  Synthetic polynucleotide
tttaactgagcaccacctatttctaacgctaggtataactaggtcgcccaagact

SEQ ID NO: 2230 - DNA, 55 bp, Artificial Sequence
  Synthetic polynucleotide
ctgagatgacccatcccttaacatatgaacaggttacgagaagagctagctcagt

SEQ ID NO: 2231 - DNA, 55 bp, Artificial Sequence
  Synthetic polynucleotide
ggatactctcagcatccatcaaacatgagatggtaagaggtagtttaccgcctat

SEQ ID NO: 2232 - DNA, 55 bp, Artificial Sequence
  Synthetic polynucleotide
tgggtttcacacgctacttaggcacctagaaggcttatgaaagtatgaaggaaaa

SEQ ID NO: 2233 - DNA, 55 bp, Artificial Sequence
  Synthetic polynucleotide
ctttgtagattatgcgcctgacataacgacgggtctcttttgttaggttaagctt

SEQ ID NO: 2234 - DNA, 55 bp, Artificial Sequence
  Synthetic polynucleotide
cgcaattattagtcaactgatttcctttccggggatggcgcaaaaggaactaggg

SEQ ID NO: 2235 - DNA, 55 bp, Artificial Sequence
  Synthetic polynucleotide
ttattcccttgctcctcttgggtctttaataggtcacgttaccgctccgaaaggg

SEQ ID NO: 2236 - DNA, 55 bp, Artificial Sequence
  Synthetic polynucleotide
tgtatcagcaaatcagcgcctgcattaattaggacgggggcggacggaagtcgtc

SEQ ID NO: 2237 - DNA, 55 bp, Artificial Sequence
  Synthetic polynucleotide
ctgggcgtcacaacaacacctattgtaaattgggccctgcggacggctcatgaag

SEQ ID NO: 2238 - DNA, 55 bp, Artificial Sequence
  Synthetic polynucleotide
tgctttccttgtaaagcttaaccatttacccggtcgaggttatggaatgcggggc

SEQ ID NO: 2239 - DNA, 55 bp, Artificial Sequence
  Synthetic polynucleotide
ggaaccgaccactcgtcatcttattgtttggggtacagagatcgccggacctaag

SEQ ID NO: 2240 - DNA, 55 bp, Artificial Sequence
  Synthetic polynucleotide
gaatacagccattccgccacacaatcaatctggaagggtaagtatccaccgaagc

SEQ ID NO: 2241 - DNA, 55 bp, Artificial Sequence
  Synthetic polynucleotide
ggtacattcgttcacaccgtcaactgttgctggagcttttaagtttccgatacgg

SEQ ID NO: 2242 - DNA, 55 bp, Artificial Sequence
  Synthetic polynucleotide
agttgagcagtgttgccctgataattctccggggaaattcgaatacgcagattcc

SEQ ID NO: 2243 - DNA, 55 bp, Artificial Sequence
  Synthetic polynucleotide
gacggacatgtacctgcatcccctgctagctggtaagacgaagtaagatttcaga

SEQ ID NO: 2244 - DNA, 55 bp, Artificial Sequence
  Synthetic polynucleotide
gacaacactcaatacccaaaattccgaaagtggcgagggatacatcagggtggta

SEQ ID NO: 2245 - DNA, 55 bp, Artificial Sequence
  Synthetic polynucleotide
actgaaaccccgtccccgtattacctgggctggaatctaacaatccctagcacac

SEQ ID NO: 2246 - DNA, 55 bp, Artificial Sequence
  Synthetic polynucleotide
ccgtgctctgtaacaacaagaagttatcgaagggagctcgcggcgggatcgcgaa

SEQ ID NO: 2247 - DNA, 55 bp, Artificial Sequence
  Synthetic polynucleotide
acaagtgactagatgccgtctaacccgaactggtttgtttaagtgcggtttgggg

SEQ ID NO: 2248 - DNA, 55 bp, Artificial Sequence
  Synthetic polynucleotide
actccgatcacttaagccgtataattacgtaggcccaggcagacaccgtatattg

SEQ ID NO: 2249 - DNA, 55 bp, Artificial Sequence
  Synthetic polynucleotide
acgacgccgcaccccactattagtctatcttggtgcggggaggagctccgccgat

SEQ ID NO: 2250 - DNA, 55 bp, Artificial Sequence
  Synthetic polynucleotide
gcacagaccccctccgcagcttagctatttagggacggggggtgactcccctccc

SEQ ID NO: 2251 - DNA, 55 bp, Artificial Sequence
  Synthetic polynucleotide
cgggcgccccaacccccacccgccttgtttgggattggtggagatgcttagggtt

SEQ ID NO: 2252 - DNA, 55 bp, Artificial Sequence
  Synthetic polynucleotide
gccgttccgacgcctacgacccctttatttaggggtgcatgcatgacgcagccgc

SEQ ID NO: 2253 - DNA, 55 bp, Artificial Sequence
  Synthetic polynucleotide
gggctccactacttcgccatgtcctcaatgtggacaggcggggcgcattgcggtg

SEQ ID NO: 2254 - DNA, 55 bp, Artificial Sequence
  Synthetic polynucleotide
gggggcgtcccgctatcccccagcgccacagggtgtttttggatcacgaatgacc

SEQ ID NO: 2255 - DNA, 55 bp, Artificial Sequence
  Synthetic polynucleotide
ctgccagatagtgcgccaagtacatcaatctggatgggggtgcggggcagtggcc

SEQ ID NO: 2256 - DNA, 55 bp, Artificial Sequence
  Synthetic polynucleotide
cttgagggcctcccttcatctctgtatgtacggcgaggggagcccgcgggcaggg

SEQ ID NO: 2257 - DNA, 55 bp, Artificial Sequence
  Synthetic polynucleotide
gccctctagctgcacgccccacctaaaaaaagggaggggtggctagcccctcgag

SEQ ID NO: 2258 - DNA, 55 bp, Artificial Sequence
  Synthetic polynucleotide
gcgagccaccatcgtccccagacacgcgattggctgcttggtttcggtcacccgg

SEQ ID NO: 2259 - DNA, 55 bp, Artificial Sequence
  Synthetic polynucleotide
gccctgtcactctctacccatgaactaaggaggaaccagcagctgccgctggcgc

SEQ ID NO: 2260 - DNA, 55 bp, Artificial Sequence
  Synthetic polynucleotide
tttgcctgctcctctcctaagccccccaagcgggaatagggagggtaacggggac

SEQ ID NO: 2261 - DNA, 55 bp, Artificial Sequence
  Synthetic polynucleotide
cggaggatccctcacacgagtatccccagtaggtgtgcggaatggagctacgggc

SEQ ID NO: 2262 - DNA, 55 bp, Artificial Sequence
  Synthetic polynucleotide
gcaagaccgaccgtctcctgcaatctcagcaggcgggaaaggagcggacacttgg

SEQ ID NO: 2263 - DNA, 55 bp, Artificial Sequence
  Synthetic polynucleotide
tgtgcccacgtacacacaattctacgaggtcggcgatgtagggcgcggagctggc

SEQ ID NO: 2264 - DNA, 55 bp, Artificial Sequence
  Synthetic polynucleotide
ttcgagagaaaattgcccattcattaattagggatacggatagtgattattttca

SEQ ID NO: 2265 - DNA, 55 bp, Artificial Sequence
  Synthetic polynucleotide
gagaaatataagtaaaccttcaactatttatggggtatgctattgttgtaaagac

SEQ ID NO: 2266 - DNA, 55 bp, Artificial Sequence
  Synthetic polynucleotide
gaaatctcacaaattacttcgaaaattattgggactagcagttcttctattattg

SEQ ID NO: 2267 - DNA, 55 bp, Artificial Sequence
  Synthetic polynucleotide
cagaaaaataaaacaactagtagtttgtttaggaagacgaaatactcccagaaga

SEQ ID NO: 2268 - DNA, 55 bp, Artificial Sequence
  Synthetic polynucleotide
atgagcgtcatactatcacaacattgattttggataagccgtaaatttaaaatcg

SEQ ID NO: 2269 - DNA, 55 bp, Artificial Sequence
  Synthetic polynucleotide
gaataagctttgagcactaagtatattgcacggtaaatgaagattcctaaatcta

SEQ ID NO: 2270 - DNA, 55 bp, Artificial Sequence
  Synthetic polynucleotide
ttagtattaaaaatagctagatgatggtcgaggatccacattccattatactctt

SEQ ID NO: 2271 - DNA, 55 bp, Artificial Sequence
  Synthetic polynucleotide
ctataaaacgttctaactcggaactaagaatggattatatgtagcttatacccaa

SEQ ID NO: 2272 - DNA, 55 bp, Artificial Sequence
  Synthetic polynucleotide
tgatattgggtaaattcaaaaaatgtttgctggctttcccagaattaaactagac

SEQ ID NO: 2273 - DNA, 55 bp, Artificial Sequence
  Synthetic polynucleotide
tacaatacaccaacatctcacttaaccctttggtgataaagcaattcgtaattat

SEQ ID NO: 2274 - DNA, 55 bp, Artificial Sequence
  Synthetic polynucleotide
aatcttaaattaatgtcctatagcgcacaagggaggcaatttcatgaatagttaa

SEQ ID NO: 2275 - DNA, 55 bp, Artificial Sequence
  Synthetic polynucleotide
attactagaataagaccatcttctctggtgcggaaatgtatgattttgaaatgat

SEQ ID NO: 2276 - DNA, 55 bp, Artificial Sequence
  Synthetic polynucleotide
aatcaagcataatacgcattaatgtagcgaaggtttttgataaacattttttgat

SEQ ID NO: 2277 - DNA, 55 bp, Artificial Sequence
  Synthetic polynucleotide
tgtaatatacagtaaactctttagcaacgctggtttatttgatagcactgctaat

SEQ ID NO: 2278 - DNA, 55 bp, Artificial Sequence
  Synthetic polynucleotide
tacagtaatatatatccctacatacaacagtgggcttaaggtaaaacgttcataa

SEQ ID NO: 2279 - DNA, 55 bp, Artificial Sequence
  Synthetic polynucleotide
tcgctcgtgacctccccatttaattattattggttgtctggaaacgttttgtaga

SEQ ID NO: 2280 - DNA, 55 bp, Artificial Sequence
  Synthetic polynucleotide
tagccatactgcttaacaagacttctttcatggattagggtgatttgccgtaatc

SEQ ID NO: 2281 - DNA, 55 bp, Artificial Sequence
  Synthetic polynucleotide
catctgttattgtccccaaaaaattaattacggggaacacttcagaccagtctga

SEQ ID NO: 2282 - DNA, 55 bp, Artificial Sequence
  Synthetic polynucleotide
aagggttacgcatccccccctgatgatttatggttctgtaaaaattggctataat

SEQ ID NO: 2283 - DNA, 55 bp, Artificial Sequence
  Synthetic polynucleotide
aaaagccttctacaatcgagtaataattatcgggttattatcaccacagctcggc

SEQ ID NO: 2284 - DNA, 55 bp, Artificial Sequence
  Synthetic polynucleotide
tttgactatgacccctcatatagatataagaggtatcttacagcgtgaaagagga

SEQ ID NO: 2285 - DNA, 55 bp, Artificial Sequence
  Synthetic polynucleotide
agaatcactagacaaaccacctgtcggtataggtatatagtaacgtacaacaacc

SEQ ID NO: 2286 - DNA, 55 bp, Artificial Sequence
  Synthetic polynucleotide
agagaacacatggataccgacatgcaattatggtatgtttaggtcacgtattttt

SEQ ID NO: 2287 - DNA, 55 bp, Artificial Sequence
  Synthetic polynucleotide
cgaacttcacaatgaccaatatagatctagtgggagaatttggaaaaagtaggga

SEQ ID NO: 2288 - DNA, 55 bp, Artificial Sequence
  Synthetic polynucleotide
tataaaccagaattgcccaaacttcacttctggttttggtatgtgttaatccctt

SEQ ID NO: 2289 - DNA, 55 bp, Artificial Sequence
  Synthetic polynucleotide
aattaccacttcctttcatcccaatagagagggattgatcgattctatttctaga

SEQ ID NO: 2290 - DNA, 55 bp, Artificial Sequence
  Synthetic polynucleotide
taagacctgtttgcacccatatcatacatcgggaaggagatcatttgaaatatga

SEQ ID NO: 2291 - DNA, 55 bp, Artificial Sequence
  Synthetic polynucleotide
aaaaagattgatttcacgatatatcaaggcgggctttcaaacactattgactacc

SEQ ID NO: 2292 - DNA, 55 bp, Artificial Sequence
  Synthetic polynucleotide
tctacatcgaatcgaacattaaattacggaaggttacctccagccatgttgagaa

SEQ ID NO: 2293 - DNA, 55 bp, Artificial Sequence
  Synthetic polynucleotide
ctccaccgttcacttactatacgaaccgaaagggtaattgtgaaagaagaaacaa

SEQ ID NO: 2294 - DNA, 55 bp, Artificial Sequence
  Synthetic polynucleotide
cttaaaaacagcccaactgctagattaaattgggcgattcgggcattacatgatc

SEQ ID NO: 2295 - DNA, 55 bp, Artificial Sequence
  Synthetic polynucleotide
tagcgctgctatgcttccttcctattattagggaaattagaggtgttagcggaag

SEQ ID NO: 2296 - DNA, 55 bp, Artificial Sequence
  Synthetic polynucleotide
gcgtcacatacctgtacataaaggatatttgggtttcgtaagcttcactctggcc

SEQ ID NO: 2297 - DNA, 55 bp, Artificial Sequence
  Synthetic polynucleotide
aaacccatggataaagctctgtcgttaatacggcgtacaatatagcccatcacga

SEQ ID NO: 2298 - DNA, 55 bp, Artificial Sequence
  Synthetic polynucleotide
aagaccaatccccgtacagccctaaataaaaggtggttttgcgtcatgatcatga

SEQ ID NO: 2299 - DNA, 55 bp, Artificial Sequence
  Synthetic polynucleotide
aactttctgtctctgtcatagtttgttaaaaggtttctacagaggaaagggccgg

SEQ ID NO: 2300 - DNA, 55 bp, Artificial Sequence
  Synthetic polynucleotide
aacctatatacccaccccacaagtgtaagtcggaggttgcttttatcatactaac

SEQ ID NO: 2301 - DNA, 55 bp, Artificial Sequence
  Synthetic polynucleotide
gatttccctcgcaaagcacgtaaggtccataggattttaacattcctccattagt

SEQ ID NO: 2302 - DNA, 55 bp, Artificial Sequence
  Synthetic polynucleotide
atgtgagctatcttcccgtatcttagaaccggggtgttgaacaaaaccgtacatg

SEQ ID NO: 2303 - DNA, 55 bp, Artificial Sequence
  Synthetic polynucleotide
ccctctgaaaaatctacacatttaagcgtgcggggagaagaagggcaacatttct

SEQ ID NO: 2304 - DNA, 55 bp, Artificial Sequence
  Synthetic polynucleotide
gtacttacctgcataccaaccctttaagtaaggcttcgggtgcatggtatctaca

SEQ ID NO: 2305 - DNA, 55 bp, Artificial Sequence
  Synthetic polynucleotide
ttaaattacctggtcacttcagtatatagcagggcaacattgcgcagggcgttat

SEQ ID NO: 2306 - DNA, 55 bp, Artificial Sequence
  Synthetic polynucleotide
gcaggaacgccatgatcaagtcaaccatgtaggtgacctatgcattaagtgtaaa

SEQ ID NO: 2307 - DNA, 55 bp, Artificial Sequence
  Synthetic polynucleotide
ccttcaccggtaagcacagaattccaggaatggttattttatgattgtgggggga

SEQ ID NO: 2308 - DNA, 55 bp, Artificial Sequence
  Synthetic polynucleotide
gtagataatccgtcacctcgatcgtcgagatggaaattaacatcgctactattca

SEQ ID NO: 2309 - DNA, 55 bp, Artificial Sequence
  Synthetic polynucleotide
gtgttgaactaccccccttagggggtttatcggcgaataatcagtactatcatgg

SEQ ID NO: 2310 - DNA, 55 bp, Artificial Sequence
  Synthetic polynucleotide
ctaataatagcatatacagcaagcatattgcggagggggaacgacatgccctagg

SEQ ID NO: 2311 - DNA, 55 bp, Artificial Sequence
  Synthetic polynucleotide
cgggaccctcgcctttcaccagatatttagaggtttagtacaacggagggacata

SEQ ID NO: 2312 - DNA, 55 bp, Artificial Sequence
  Synthetic polynucleotide
caactgctcctggcatcccgccttatagataggtagcggggtattgattgggacc

SEQ ID NO: 2313 - DNA, 55 bp, Artificial Sequence
  Synthetic polynucleotide
gagttccctgccccgcctacatacctaacttggaaggatgtatggccaatggtca

SEQ ID NO: 2314 - DNA, 55 bp, Artificial Sequence
  Synthetic polynucleotide
acctccgtgtaagatccctcaccttctcttgggagagtatagaactaccgtatca

SEQ ID NO: 2315 - DNA, 55 bp, Artificial Sequence
  Synthetic polynucleotide
cgaataacaaaaaacccggataccaaatcgggggctgtaaagtgtcgtggcgcat

SEQ ID NO: 2316 - DNA, 55 bp, Artificial Sequence
  Synthetic polynucleotide
ggttaacgacgcgtctccatattagtttaggggtgctagactcgcccttaaacga

SEQ ID NO: 2317 - DNA, 55 bp, Artificial Sequence
  Synthetic polynucleotide
tgagtattacattccacccccggacatctgaggtcatgctagtctgctagtgaga

SEQ ID NO: 2318 - DNA, 55 bp, Artificial Sequence
  Synthetic polynucleotide
aggatcaccagagctgccatcctagcagtagggttggcaacgtggattttaaaat

SEQ ID NO: 2319 - DNA, 55 bp, Artificial Sequence
  Synthetic polynucleotide
tgatgccggtgtaacaccataaatactatgagggatacagggtagagatcggctg

SEQ ID NO: 2320 - DNA, 55 bp, Artificial Sequence
  Synthetic polynucleotide
tatcaaggtaccaaaactcatccatacccttggtgacagggaggacggtgcaatt

SEQ ID NO: 2321 - DNA, 55 bp, Artificial Sequence
  Synthetic polynucleotide
agtttgcgtaaggtcaccataaatcatgggaggcatgtaccggagaggaagttcg

SEQ ID NO: 2322 - DNA, 55 bp, Artificial Sequence
  Synthetic polynucleotide
acgaatgaaagaatgccaaggtaaaaaggttggcccatttcgaattgtgcccccc

SEQ ID NO: 2323 - DNA, 55 bp, Artificial Sequence
  Synthetic polynucleotide
gagtccacgccgtagaccagtgacaccgtggggataatcgggattgtatagctca

SEQ ID NO: 2324 - DNA, 55 bp, Artificial Sequence
  Synthetic polynucleotide
caccgcacgctccactcgtcaaaaatttcaaggtggacggaacccggccgggggg

SEQ ID NO: 2325 - DNA, 55 bp, Artificial Sequence
  Synthetic polynucleotide
cgtcaaccgctcctctcggccggaatctttaggagtgagtgttgcgcacctcccc

SEQ ID NO: 2326 - DNA, 55 bp, Artificial Sequence
  Synthetic polynucleotide
accctacctcgctactctcccctcttaattagggggggggcgccacccatggagg

SEQ ID NO: 2327 - DNA, 55 bp, Artificial Sequence
  Synthetic polynucleotide
acggtctctctgatctctcctctcttcctagggacggcgctagacgggatggcgc

SEQ ID NO: 2328 - DNA, 55 bp, Artificial Sequence
  Synthetic polynucleotide
aggcattgaccaccgcccatccgtacttagtggagtacagatcgagccggccggg

SEQ ID NO: 2329 - DNA, 55 bp, Artificial Sequence
  Synthetic polynucleotide
ggagtctcctcccattccgcaactactgcggggaggctggggcgtgcgacgtgaa

SEQ ID NO: 2330 - DNA, 55 bp, Artificial Sequence
  Synthetic polynucleotide
aggggccccacacccgcacctacaaaggtttggacaagcgtgtgcggcgaatgga

SEQ ID NO: 2331 - DNA, 55 bp, Artificial Sequence
  Synthetic polynucleotide
tagccgtccaccgaccccgaagccctcgcatggatgcaaggggtggtaaacaccc

SEQ ID NO: 2332 - DNA, 55 bp, Artificial Sequence
  Synthetic polynucleotide
ccacccccctactccaccctctcggcctgagggataaatgtggttgcgcccggct

SEQ ID NO: 2333 - DNA, 55 bp, Artificial Sequence
  Synthetic polynucleotide
gttggccgtctttctccccccatgccatgatgggggactacgaaggccgcgacgt

SEQ ID NO: 2334 - DNA, 55 bp, Artificial Sequence
  Synthetic polynucleotide
ggactcccctatatgcctacgtaacaagcgggggtagctgggtggccgttggagc

SEQ ID NO: 2335 - DNA, 55 bp, Artificial Sequence
  Synthetic polynucleotide
tcccgctacccctacactattcacgtctggaggagtctgcacggaagggggggag

SEQ ID NO: 2336 - DNA, 55 bp, Artificial Sequence
  Synthetic polynucleotide
gaggctcacccagcatcgtatcacaaccgttggatggcgggcccagcgcatgctc

SEQ ID NO: 2337 - DNA, 55 bp, Artificial Sequence
  Synthetic polynucleotide
cccgaagatgaaccaacagacacctacgggcggcctcgtgtggagcggcgggtaa

SEQ ID NO: 2338 - DNA, 55 bp, Artificial Sequence
  Synthetic polynucleotide
ggccaattgcgcatctcactcgactaacggtggaagtgtaggggccgggcgatgg

SEQ ID NO: 2339 - DNA, 55 bp, Artificial Sequence
  Synthetic polynucleotide
tatggcttgattactcctgtgtgatttaaaaggaatttaaaccatttgcagagat

SEQ ID NO: 2340 - DNA, 55 bp, Artificial Sequence
  Synthetic polynucleotide
tcattaagttcaatatctgcctatttattgcggtacagtaaagttaatcagattt

SEQ ID NO: 2341 - DNA, 55 bp, Artificial Sequence
  Synthetic polynucleotide
gtgtaatttcaaacttcaaccaatataaatcggatgtctctgttattaacggata

SEQ ID NO: 2342 - DNA, 55 bp, Artificial Sequence
  Synthetic polynucleotide
tatgaaattgcaatatcctgtaatataatcgggaacgatgagtactggttcaata

SEQ ID NO: 2343 - DNA, 55 bp, Artificial Sequence
  Synthetic polynucleotide
taattgaaacaagcaacaaaatttgaatttagggtctatttatactgggaactga

SEQ ID NO: 2344 - DNA, 55 bp, Artificial Sequence
  Synthetic polynucleotide
atattgtcatacaattcacccctcgattcatggggttatatattgcatgaaaaat

SEQ ID NO: 2345 - DNA, 55 bp, Artificial Sequence
  Synthetic polynucleotide
aaatgccttaatcaaacgtcaagaatgtcttggacctttacgctattatatttct

SEQ ID NO: 2346 - DNA, 55 bp, Artificial Sequence
  Synthetic polynucleotide
ttcattataatttgcacaaaagttagtaaacggatatgaacgatctatatgacct

SEQ ID NO: 2347 - DNA, 55 bp, Artificial Sequence
  Synthetic polynucleotide
gttagaatcttctctaccattacattcatatggattgagaaagatgattaattca

SEQ ID NO: 2348 - DNA, 55 bp, Artificial Sequence
  Synthetic polynucleotide
aagattcgaataatagcttgggttgtaccacggaattaatctatatcattactaa

SEQ ID NO: 2349 - DNA, 55 bp, Artificial Sequence
  Synthetic polynucleotide
ggatcggcatcgtaatctcgtatttctgacaggatttaaaaataaatcttatttc

SEQ ID NO: 2350 - DNA, 55 bp, Artificial Sequence
  Synthetic polynucleotide
atgtatactctcagtacaaatgagagtatcaggtttaattattttactgcttgac

SEQ ID NO: 2351 - DNA, 55 bp, Artificial Sequence
  Synthetic polynucleotide
acttaattagtgaacacattaatatgacacggggctaggctatattttaaatctg

SEQ ID NO: 2352 - DNA, 55 bp, Artificial Sequence
  Synthetic polynucleotide
atacacctagatttcacaatctggcaacgatggtttaagaattttacacgttatt

SEQ ID NO: 2353 - DNA, 55 bp, Artificial Sequence
  Synthetic polynucleotide
ctatattaaacgattacattaatagacggccggtaatcttaggtgtttaatttag

SEQ ID NO: 2354 - DNA, 55 bp, Artificial Sequence
  Synthetic polynucleotide
atcagcatgccctctacaacagacttattgaggatagaattattattccgtaagg

SEQ ID NO: 2355 - DNA, 55 bp, Artificial Sequence
  Synthetic polynucleotide
gagtagaatgagcgccctatgggcataattcggtaagtacaaagaaatttaactc

SEQ ID NO: 2356 - DNA, 55 bp, Artificial Sequence
  Synthetic polynucleotide
gttatgcacacataatcatttctaatttaagggaacctcaaatgcgcacgcaaat

SEQ ID NO: 2357 - DNA, 55 bp, Artificial Sequence
  Synthetic polynucleotide
atactccatttcacgaccattcctgattagaggaattattcaggttcatggtcgt

SEQ ID NO: 2358 - DNA, 55 bp, Artificial Sequence
  Synthetic polynucleotide
gaagttactgatgtaactttggttgtttacgggagtagcaacatatacccttagt

SEQ ID NO: 2359 - DNA, 55 bp, Artificial Sequence
  Synthetic polynucleotide
gtactttcgcgggtctcgatcattattataaggttataaagggtctgctgatgta

SEQ ID NO: 2360 - DNA, 55 bp, Artificial Sequence
  Synthetic polynucleotide
tatgtaataatcctatcctccgatcgccttaggttaggaacttaaggttgcattg

SEQ ID NO: 2361 - DNA, 55 bp, Artificial Sequence
  Synthetic polynucleotide
tgtgtaaaatgttataccggttatacaatggggctctagtaaaaaatgagggtta

SEQ ID NO: 2362 - DNA, 55 bp, Artificial Sequence
  Synthetic polynucleotide
atacacgtttatattcccagtataattacagggagaagataccagcggacggtaa

SEQ ID NO: 2363 - DNA, 55 bp, Artificial Sequence
  Synthetic polynucleotide
ttaggaaaagccaattctaagagaaacctcgggggagtaatttgtatcttggtac

SEQ ID NO: 2364 - DNA, 55 bp, Artificial Sequence
  Synthetic polynucleotide
tcttcacatattcattccaacgtattaagggggtaagataaggaccttctcaatt

SEQ ID NO: 2365 - DNA, 55 bp, Artificial Sequence
  Synthetic polynucleotide
agattgcggttaagatcaaaattaatgacctgggcagttcacgtgcttcctttat

SEQ ID NO: 2366 - DNA, 55 bp, Artificial Sequence
  Synthetic polynucleotide
taagtcttcccaggtacttgtacaaccgtgcgggatatttataattaatcgtctg

SEQ ID NO: 2367 - DNA, 55 bp, Artificial Sequence
  Synthetic polynucleotide
agtcgagaaatagaaacttcctaaaaacgccgggtaagctttttcttgatcggta

SEQ ID NO: 2368 - DNA, 55 bp, Artificial Sequence
  Synthetic polynucleotide
atgactcctgtacactctctagaccattgatggaattaatggtagttgtagatgc

SEQ ID NO: 2369 - DNA, 55 bp, Artificial Sequence
  Synthetic polynucleotide
taactttgccagctccctactttctttaaaaggtctgaggctcgtaacttaggcc

SEQ ID NO: 2370 - DNA, 55 bp, Artificial Sequence
  Synthetic polynucleotide
agaaggtcagacgagcccctggctttaaataggtgttgtcgtcgatataattctt

SEQ ID NO: 2371 - DNA, 55 bp, Artificial Sequence
  Synthetic polynucleotide
catttccctttcttatctcacattcttgctgggggacaggacattccatctagaa

SEQ ID NO: 2372 - DNA, 55 bp, Artificial Sequence
  Synthetic polynucleotide
tgagaatcacaagctccatgcacgcttatgtgggaactataatttggggagaaag

SEQ ID NO: 2373 - DNA, 55 bp, Artificial Sequence
  Synthetic polynucleotide
aggcttgcgctctttacagttaattatatcagggccccgactgtacgactttgtt

SEQ ID NO: 2374 - DNA, 55 bp, Artificial Sequence
  Synthetic polynucleotide
cataaaattgttctgacaactcaagtttcgcgggcagctttagattacgtgaacg

SEQ ID NO: 2375 - DNA, 55 bp, Artificial Sequence
  Synthetic polynucleotide
gggtatgtttctataacgacattcatcataagggtcaagtagcgataggaggcgc

SEQ ID NO: 2376 - DNA, 55 bp, Artificial Sequence
  Synthetic polynucleotide
gacaacatcaacaacgccgtagtataggtttgggagctacttaatgaactggtgc

SEQ ID NO: 2377 - DNA, 55 bp, Artificial Sequence
  Synthetic polynucleotide
caagacaatagggtctcgggaaagaaattccggtcgccagcaatttttgcatttt

SEQ ID NO: 2378 - DNA, 55 bp, Artificial Sequence
  Synthetic polynucleotide
ttttatgcaatgatcccccacaatgttgggtggcgagatatagaagtctatccga

SEQ ID NO: 2379 - DNA, 55 bp, Artificial Sequence
  Synthetic polynucleotide
gtatacgccctttcgtctcgtttacccgaaaggaacaccgtatagcactctttat

SEQ ID NO: 2380 - DNA, 55 bp, Artificial Sequence
  Synthetic polynucleotide
tttcaacccaacggttctcacctattcacgaggttagatgatacgtatcactgcc

SEQ ID NO: 2381 - DNA, 55 bp, Artificial Sequence
  Synthetic polynucleotide
gttagtcctacccactcaaaattacgtagtagggagataccacattccagagtgg

SEQ ID NO: 2382 - DNA, 55 bp, Artificial Sequence
  Synthetic polynucleotide
tgcgtactggatactccctataacctctgaaggtcacgtgaaattctgagacaac

SEQ ID NO: 2383 - DNA, 55 bp, Artificial Sequence
  Synthetic polynucleotide
ggacctattacctttcccgaaacaaatggtgggacacacaagcatatttgttaag

SEQ ID NO: 2384 - DNA, 55 bp, Artificial Sequence
  Synthetic polynucleotide
taagctatactacgcccgccttagttattcgggattaagtatgagggccccacca

SEQ ID NO: 2385 - DNA, 55 bp, Artificial Sequence
  Synthetic polynucleotide
gcgacgtcccatctgacgattctaatttaaaggcacgagggcagttgctctgacg

SEQ ID NO: 2386 - DNA, 55 bp, Artificial Sequence
  Synthetic polynucleotide
gagctttttaccgctgctgccttgatttccagggtattaagttgtctccccccgg

SEQ ID NO: 2387 - DNA, 55 bp, Artificial Sequence
  Synthetic polynucleotide
caatcttctcgtcccccttccttaatttgtgggagtaattgcgcgtttatgcgag

SEQ ID NO: 2388 - DNA, 55 bp, Artificial Sequence
  Synthetic polynucleotide
gccaagctttcgcttacggggtaccctttaaggaagagcgtaagactgtgctatg

SEQ ID NO: 2389 - DNA, 55 bp, Artificial Sequence
  Synthetic polynucleotide
agtattacggtccccacggctcgccattataggatgcgatacgttagacttgtga

SEQ ID NO: 2390 - DNA, 55 bp, Artificial Sequence
  Synthetic polynucleotide
ggcggatctactaaccccagctgcgtatagaggagttgttataattccttgggct

SEQ ID NO: 2391 - DNA, 55 bp, Artificial Sequence
  Synthetic polynucleotide
tacgatgtagtacgaacacatagaacgtcctggcgtttttctcggtcctctcctg

SEQ ID NO: 2392 - DNA, 55 bp, Artificial Sequence
  Synthetic polynucleotide
agactacgactcacccccctctaacccctgtggatatttacacggtgctctcacc

SEQ ID NO: 2393 - DNA, 55 bp, Artificial Sequence
  Synthetic polynucleotide
taacctcagatgatcgcaggataaaaaccttggaatcatgcagtgccccaggccc

SEQ ID NO: 2394 - DNA, 55 bp, Artificial Sequence
  Synthetic polynucleotide
ggcaaagcacgcacatctaagtcgcatgtttggatgtccaagattttcctggtcc

SEQ ID NO: 2395 - DNA, 55 bp, Artificial Sequence
  Synthetic polynucleotide
agaggccttaatgttccgaaaaaaaccgtaaggtgcctatactggtgcccttgcc

SEQ ID NO: 2396 - DNA, 55 bp, Artificial Sequence
  Synthetic polynucleotide
tgccacttcaacaagtccgaatactacgtagggcaggtacccagctcatgcctct

SEQ ID NO: 2397 - DNA, 55 bp, Artificial Sequence
  Synthetic polynucleotide
gatttcatccactaaccaatacaagccaggtggttcgcgttagtgcggtaacaac

SEQ ID NO: 2398 - DNA, 55 bp, Artificial Sequence
  Synthetic polynucleotide
accggcactccacatacttctttgctcaggcggggaatggtggacgttggggacg

SEQ ID NO: 2399 - DNA, 55 bp, Artificial Sequence
  Synthetic polynucleotide
ctcccagcatactgggcgcccccccctttggggagttgtctgcggaatcaagtca

SEQ ID NO: 2400 - DNA, 55 bp, Artificial Sequence
  Synthetic polynucleotide
gcaatgccctagcgcaccccgcctacttctggggatgatcgatcacacgggagag

SEQ ID NO: 2401 - DNA, 55 bp, Artificial Sequence
  Synthetic polynucleotide
tggcacgtgaaccaaaccgcgacatatttcgggggctggttggggtgtgcggcct

SEQ ID NO: 2402 - DNA, 55 bp, Artificial Sequence
  Synthetic polynucleotide
atgggctcgcgctcacctcctgtgttaaatggggaagcgcggcccctcttcctga

SEQ ID NO: 2403 - DNA, 55 bp, Artificial Sequence
  Synthetic polynucleotide
aggcagaacccgcccccgactcacctaatttgggactataatgcggccgcgtccc

SEQ ID NO: 2404 - DNA, 55 bp, Artificial Sequence
  Synthetic polynucleotide
ccacatctcgtcccatctatcaactgattgggggggggcggacctcgtgggtggc

SEQ ID NO: 2405 - DNA, 55 bp, Artificial Sequence
  Synthetic polynucleotide
gatgtgacgcccgccccgcctgtttaatgaaggtctcgacagttcgcgcctacgg

SEQ ID NO: 2406 - DNA, 55 bp, Artificial Sequence
  Synthetic polynucleotide
gcaaccctgctcactccccatctacgttggtgggaggctgcaagcggtgtcaccg

SEQ ID NO: 2407 - DNA, 55 bp, Artificial Sequence
  Synthetic polynucleotide
gcaccccccgtcgcgcccgcaccacttgtttgggagtcggtaagggtgacaacgg

SEQ ID NO: 2408 - DNA, 55 bp, Artificial Sequence
  Synthetic polynucleotide
cacttgggtgcaccctcctagcttcctgagaggagtgggagcgtgcctcgagacc

SEQ ID NO: 2409 - DNA, 55 bp, Artificial Sequence
  Synthetic polynucleotide
gcagccgactacagatctcataatgtgggagggcccgttgcgccccttccgcgtt

SEQ ID NO: 2410 - DNA, 55 bp, Artificial Sequence
  Synthetic polynucleotide
tctggctatcgaccctcttactagtatgggtggggggtggcagggccgcagggta

SEQ ID NO: 2411 - DNA, 55 bp, Artificial Sequence
  Synthetic polynucleotide
tcccacaatcaaatcgcatccaattcctgcggggttacggaggcggggcgctccg

SEQ ID NO: 2412 - DNA, 55 bp, Artificial Sequence
  Synthetic polynucleotide
acgttcaaccgacatccactagcctccggggggaagcgtcaggcgatcagcgtga

SEQ ID NO: 2413 - DNA, 55 bp, Artificial Sequence
  Synthetic polynucleotide
agccgccgtcaccgttccttcatccacggcaggatgggaggtcgcccgattggcc

SEQ ID NO: 2414 - DNA, 55 bp, Artificial Sequence
  Synthetic polynucleotide
ctagaattttatatatcgtatatcatattttggatgttggacaaccggaaattcg

SEQ ID NO: 2415 - DNA, 55 bp, Artificial Sequence
  Synthetic polynucleotide
tatttaccatttcttgcttaacaaatttcatggcggacatcgtttaatgttactg

SEQ ID NO: 2416 - DNA, 55 bp, Artificial Sequence
  Synthetic polynucleotide
ctgtaaaaaccctattccacaacattataaaggtctgagcttttaatgttaatgg

SEQ ID NO: 2417 - DNA, 55 bp, Artificial Sequence
  Synthetic polynucleotide
ttagcatttcaatactcttacaataaattttggagccttttgactcgaatgctgt

SEQ ID NO: 2418 - DNA, 55 bp, Artificial Sequence
  Synthetic polynucleotide
atatcctctgtctaatcctttctcatataaagggtataccataattatacccttt

SEQ ID NO: 2419 - DNA, 55 bp, Artificial Sequence
  Synthetic polynucleotide
cggcagttaaagattacctcatttatataacggagatcctagagaaataaacata

SEQ ID NO: 2420 - DNA, 55 bp, Artificial Sequence
  Synthetic polynucleotide
acctctttatatttacctgataactcaaagaggaatagtttttttaatgttaatg

SEQ ID NO: 2421 - DNA, 55 bp, Artificial Sequence
  Synthetic polynucleotide
cattataatctgaatacctaacaaactagatggatttgacgtgaattaggaatcg

SEQ ID NO: 2422 - DNA, 55 bp, Artificial Sequence
  Synthetic polynucleotide
gccacccgcatacatacgaaaaacaagttttggatattatctagtaaaaaaagtt

SEQ ID NO: 2423 - DNA, 55 bp, Artificial Sequence
  Synthetic polynucleotide
ttaaattattagttgacccacataaccatggggttaatttaaagtaatagagagg

SEQ ID NO: 2424 - DNA, 55 bp, Artificial Sequence
  Synthetic polynucleotide
aaaataaagccataaccatagaaccattgtaggtgatgtgtgtgtttttataatt

SEQ ID NO: 2425 - DNA, 55 bp, Artificial Sequence
  Synthetic polynucleotide
aagaagagcatgtttgcaaaaaattattgtcggttcctcatgatatttaacataa

SEQ ID NO: 2426 - DNA, 55 bp, Artificial Sequence
  Synthetic polynucleotide
gttggaatcattatgacatacccttacggaaggaatttcttgattcatcattaat

SEQ ID NO: 2427 - DNA, 55 bp, Artificial Sequence
  Synthetic polynucleotide
taagaggaatgtattacataaccttaccgtaggaagtgtgtaattctagcaattt

SEQ ID NO: 2428 - DNA, 55 bp, Artificial Sequence
  Synthetic polynucleotide
gatctagtaaaaaacgcacaataaaacaggaggtagtgatagataagtatatagc

SEQ ID NO: 2429 - DNA, 55 bp, Artificial Sequence
  Synthetic polynucleotide
tggttattgcaccctccactaatcctatttcggagaattgtaacgtttaaggtct

SEQ ID NO: 2430 - DNA, 55 bp, Artificial Sequence
  Synthetic polynucleotide
actctaaactcatttccttaaacatatttgtggtagaagatgaggtttgccgata

SEQ ID NO: 2431 - DNA, 55 bp, Artificial Sequence
  Synthetic polynucleotide
tcttgatacagaatttcctttaatatattgaggcgcggtttgctgcattttgcgg

SEQ ID NO: 2432 - DNA, 55 bp, Artificial Sequence
  Synthetic polynucleotide
atcaactctagtccagccaccttctataaaaggatgaaacgttcatttgcaaagt

SEQ ID NO: 2433 - DNA, 55 bp, Artificial Sequence
  Synthetic polynucleotide
tctgatattattagagcgttaacgtaaaaggggtgcattcttctggagataggat

SEQ ID NO: 2434 - DNA, 55 bp, Artificial Sequence
  Synthetic polynucleotide
gttaggcaaatatactccaagccctcataatggatagatatgacaattcttcgat

SEQ ID NO: 2435 - DNA, 55 bp, Artificial Sequence
  Synthetic polynucleotide
tttttttccaccgttactcctcgctccgtaaggaatcttagattcagaaaactaa

SEQ ID NO: 2436 - DNA, 55 bp, Artificial Sequence
  Synthetic polynucleotide
aagttccattaaagtcctcatcatacaatgtggttctgcatcgagatgagtttgc

SEQ ID NO: 2437 - DNA, 55 bp, Artificial Sequence
  Synthetic polynucleotide
acacaaaattgtcgaccagaatccgctttggggtaacttttgatccaaaatgaag

SEQ ID NO: 2438 - DNA, 55 bp, Artificial Sequence
  Synthetic polynucleotide
tctaacgccagtagtcctaaattattcactagggaacggacacagtttacttata

SEQ ID NO: 2439 - DNA, 55 bp, Artificial Sequence
  Synthetic polynucleotide
aagacaatttgaactacaatatcaatatgggggaactctttgggtactgaacacg

SEQ ID NO: 2440 - DNA, 55 bp, Artificial Sequence
  Synthetic polynucleotide
tttataggttgattaacttcaccaaattggcgggtgaaagtgaacagcaattggc

SEQ ID NO: 2441 - DNA, 55 bp, Artificial Sequence
  Synthetic polynucleotide
tgtctaaagcatctaccccaagtacattggaggctgagtatctattcggtattaa

SEQ ID NO: 2442 - DNA, 55 bp, Artificial Sequence
  Synthetic polynucleotide
cataagagagcaaacaccaattccaccgtagggatgttgtataaaaagaggtcaa

SEQ ID NO: 2443 - DNA, 55 bp, Artificial Sequence
  Synthetic polynucleotide
cggaaatctgtacgtacagtgtagaaccaatgggcattttaaatatatcagattt

SEQ ID NO: 2444 - DNA, 55 bp, Artificial Sequence
  Synthetic polynucleotide
atcgtgaaactcgcttcgctctcgtaaattaggaaggtgccaatatactgaatcc

SEQ ID NO: 2445 - DNA, 55 bp, Artificial Sequence
  Synthetic polynucleotide
aaagaagtaaccatgcctgagcgctaaatttggtggtcttcgaccacagtttctg

SEQ ID NO: 2446 - DNA, 55 bp, Artificial Sequence
  Synthetic polynucleotide
acaagtttacgaaattctggatatcatttgcggtgctgcgtgaagttggtgagat

SEQ ID NO: 2447 - DNA, 55 bp, Artificial Sequence
  Synthetic polynucleotide
aggttgcagtagattgccgttgttgttaatcggaaagtcaccctctatgctaatg

SEQ ID NO: 2448 - DNA, 55 bp, Artificial Sequence
  Synthetic polynucleotide
cagtagtaatcagcaaccactttataaaaagggacgcatgtaggaggtagccttg

SEQ ID NO: 2449 - DNA, 55 bp, Artificial Sequence
  Synthetic polynucleotide
aaagcttttaacacggctaaaataacattggggggacctcctctgagccctttga

SEQ ID NO: 2450 - DNA, 55 bp, Artificial Sequence
  Synthetic polynucleotide
aaatgcaaagcgcgacctagactctattaacggtcataagttgggttgcgaacgt

SEQ ID NO: 2451 - DNA, 55 bp, Artificial Sequence
  Synthetic polynucleotide
ataggtacttacatggcatactttaatcctcggcgttggtttggttgagatggga

SEQ ID NO: 2452 - DNA, 55 bp, Artificial Sequence
  Synthetic polynucleotide
caggttgtctttacatcccttcatacttgagggggtcagatatgtgggctatcaa

SEQ ID NO: 2453 - DNA, 55 bp, Artificial Sequence
  Synthetic polynucleotide
tttggtcccaccctttccaacgagtacaaatggtgaatttattgcctatggcatc

SEQ ID NO: 2454 - DNA, 55 bp, Artificial Sequence
  Synthetic polynucleotide
tcgtataaagattggacacaaccaactggggggaataaagttatcgtgccgatcg

SEQ ID NO: 2455 - DNA, 55 bp, Artificial Sequence
  Synthetic polynucleotide
cccgactaagatatttcacttaatatccggggggctaacaaaatcaaccttcgcg

SEQ ID NO: 2456 - DNA, 55 bp, Artificial Sequence
  Synthetic polynucleotide
actaagtcaccctgtactatctttaacagaaggcggggagaatccatacgtgact

SEQ ID NO: 2457 - DNA, 55 bp, Artificial Sequence
  Synthetic polynucleotide
ttttcacggtcaatcccatctccaacgagaaggtgttataatcctaagcttccga

SEQ ID NO: 2458 - DNA, 55 bp, Artificial Sequence
  Synthetic polynucleotide
cgtcttgatatcaagacacacattcccagtggggttattttcggtttgacacttt

SEQ ID NO: 2459 - DNA, 55 bp, Artificial Sequence
  Synthetic polynucleotide
ccaaatgcccctttctcacgcaactaaattcggaggcgttggaaagcttgttgtg

SEQ ID NO: 2460 - DNA, 55 bp, Artificial Sequence
  Synthetic polynucleotide
ggttttgaccccctgactctgcatatttaagggtggcgtgcacaaggaaagctaa

SEQ ID NO: 2461 - DNA, 55 bp, Artificial Sequence
  Synthetic polynucleotide
tactacggtcgcgaaccccttagctctttgtggatgtgtcgagcgcgatgaaata

SEQ ID NO: 2462 - DNA, 55 bp, Artificial Sequence
  Synthetic polynucleotide
tgactcatccgaaatacagtatctattgctgggctgctcgctaacgacctaagag

SEQ ID NO: 2463 - DNA, 55 bp, Artificial Sequence
  Synthetic polynucleotide
ccgatacgctagactactgttgagatattcgggcggtaaccgccccatcccctct

SEQ ID NO: 2464 - DNA, 55 bp, Artificial Sequence
  Synthetic polynucleotide
ttcgggtagtcctcaccccctctgcaatttaggagttcagttattgtgagctcaa

SEQ ID NO: 2465 - DNA, 55 bp, Artificial Sequence
  Synthetic polynucleotide
gggtttcgcgcgtaggcataaaagtaactatggtcatttcgagcctctttcgcag

SEQ ID NO: 2466 - DNA, 55 bp, Artificial Sequence
  Synthetic polynucleotide
aacacgcccccgcgcccctcgtcaagattgtgggttacagttgatataggtttgc

SEQ ID NO: 2467 - DNA, 55 bp, Artificial Sequence
  Synthetic polynucleotide
ccgccacaaattgtcgcattgattattactaggcgctaggtgcgccctgtccctg

SEQ ID NO: 2468 - DNA, 55 bp, Artificial Sequence
  Synthetic polynucleotide
gctgggataatccacaccgataaatttggtgggctgctcagcgatgttagagatt

SEQ ID NO: 2469 - DNA, 55 bp, Artificial Sequence
  Synthetic polynucleotide
gtacccactcactagcccacacgtatatggggggtctagatgttcgtccaatcgc

SEQ ID NO: 2470 - DNA, 55 bp, Artificial Sequence
  Synthetic polynucleotide
ttggtgcacagtgcagcctctcttacaggtcggttgaatgaagtgggtcgatagt

SEQ ID NO: 2471 - DNA, 55 bp, Artificial Sequence
  Synthetic polynucleotide
tgcaattgtgttgctgcgtccaatcctagaaggtttagagagaactgcgggatgt

SEQ ID NO: 2472 - DNA, 55 bp, Artificial Sequence
  Synthetic polynucleotide
ggtcaaaaggctcccacgatctaacatggttggttccggggaggagtggacgccg

SEQ ID NO: 2473 - DNA, 55 bp, Artificial Sequence
  Synthetic polynucleotide
tctatagggcgtacaccacctaaacccgaaaggatagttgcatgttccatgtcag

SEQ ID NO: 2474 - DNA, 55 bp, Artificial Sequence
  Synthetic polynucleotide
cggccaggccctatcccgttcgctctttaagggaaggcggaggtcgtcccagaaa

SEQ ID NO: 2475 - DNA, 55 bp, Artificial Sequence
  Synthetic polynucleotide
tcgccgccgcatggcgctcttccctttaaagggatgtcacacaggaacgcctggc

SEQ ID NO: 2476 - DNA, 55 bp, Artificial Sequence
  Synthetic polynucleotide
gaaggcacgccctgccccccaactaattagggggcgcaggttcggcttggcgcgg

SEQ ID NO: 2477 - DNA, 55 bp, Artificial Sequence
  Synthetic polynucleotide
ttgctaggtagtttgtccaccctccaattgtggggggcaggggtttcggccgccc

SEQ ID NO: 2478 - DNA, 55 bp, Artificial Sequence
  Synthetic polynucleotide
ctcccctgcgcaagatcatcacttctatttggggcgccggggggtggatctgccg

SEQ ID NO: 2479 - DNA, 55 bp, Artificial Sequence
  Synthetic polynucleotide
ggcgagggtcccgtcccacacactcttattgggtaaaggcgcgtgagggtccacc

SEQ ID NO: 2480 - DNA, 55 bp, Artificial Sequence
  Synthetic polynucleotide
cacgtcgccgttagtacccatcgccctataaggggactgacgggaggggtgggtt

SEQ ID NO: 2481 - DNA, 55 bp, Artificial Sequence
  Synthetic polynucleotide
tagtacccctcgtgtccgcccatcttaagaggggggggcgtgtcaggaccagact

SEQ ID NO: 2482 - DNA, 55 bp, Artificial Sequence
  Synthetic polynucleotide
gcgtggtcgtgtcctcctgatacattcgttaggtacgggggaggcgggtgccagt

SEQ ID NO: 2483 - DNA, 55 bp, Artificial Sequence
  Synthetic polynucleotide
tcctgcgcgaatcgcgcctcctaactcgtggggggacgtaatcaggctctgggca

SEQ ID NO: 2484 - DNA, 55 bp, Artificial Sequence
  Synthetic polynucleotide
tccgacagcgcctcacccgcttacctaggttgggggagtgagatacgggacatcc

SEQ ID NO: 2485 - DNA, 55 bp, Artificial Sequence
  Synthetic polynucleotide
ttggcctcgccgcctccctcagtacccaagaggaaggagcgcagcaggcaatctc

SEQ ID NO: 2486 - DNA, 55 bp, Artificial Sequence
  Synthetic polynucleotide
ggaccacaatacactaccccaatcccagggaggtgtgtcggtgcgaaggcgaggg

SEQ ID NO: 2487 - DNA, 55 bp, Artificial Sequence
  Synthetic polynucleotide
ccgcagctatcactgacctcattcaaacgccggggtacgggtgcgtagcctggcg

SEQ ID NO: 2488 - DNA, 55 bp, Artificial Sequence
  Synthetic polynucleotide
taggagatgaaattatcccatctacaacgcgggcgggcggttccgggcggcgagg

SEQ ID NO: 2489 - DNA, 55 bp, Artificial Sequence
  Synthetic polynucleotide
atacataaattctgtactgctaaggtttaaaggttaatcatacatactagcaggt

SEQ ID NO: 2490 - DNA, 55 bp, Artificial Sequence
  Synthetic polynucleotide
ttcacaataatcaatcctctggtttaaaaatggtttgaccggaacgaattatagt

SEQ ID NO: 2491 - DNA, 55 bp, Artificial Sequence
  Synthetic polynucleotide
tttcatattgctaagtcatgttggtaaatacggtaaactacgttagaataaataa

SEQ ID NO: 2492 - DNA, 55 bp, Artificial Sequence
  Synthetic polynucleotide
cagcgtatactcactacatactggaaattatggaaagcaattataatcgttaatg

SEQ ID NO: 2493 - DNA, 55 bp, Artificial Sequence
  Synthetic polynucleotide
actaaactactcaacacgttataggtaattaggttaatgtgatatcacgaactaa

SEQ ID NO: 2494 - DNA, 55 bp, Artificial Sequence
  Synthetic polynucleotide
actttatttcttatagcaaatgcatctatctggctctactagtggtgaaatgtta

SEQ ID NO: 2495 - DNA, 55 bp, Artificial Sequence
  Synthetic polynucleotide
attgctcaagatgaatctctaaaaacaaacaggtgggcaattatatggttttagt

SEQ ID NO: 2496 - DNA, 55 bp, Artificial Sequence
  Synthetic polynucleotide
cgatttcttatacttacgtgttcggataatcggaactactaactgtaaatttaca

SEQ ID NO: 2497 - DNA, 55 bp, Artificial Sequence
  Synthetic polynucleotide
tatatacaagatattccgcaatggtacaaatggttatgaatcatatatgccgtat

SEQ ID NO: 2498 - DNA, 55 bp, Artificial Sequence
  Synthetic polynucleotide
aggatttatacatgtaccctggtattccactggtttttaagttttagtattgtct

SEQ ID NO: 2499 - DNA, 55 bp, Artificial Sequence
  Synthetic polynucleotide
ggagctatagggttaccacattaatacatacggatgaagtcaattgaaataataa

SEQ ID NO: 2500 - DNA, 55 bp, Artificial Sequence
  Synthetic polynucleotide
ttaataaaaacgtatccacaactcgtacctcggcattaagttataattgcattag

SEQ ID NO: 2501 - DNA, 55 bp, Artificial Sequence
  Synthetic polynucleotide
atgtttgtggtatatgcaaaattacagcagggggagtgttgttttaaaattaact

SEQ ID NO: 2502 - DNA, 55 bp, Artificial Sequence
  Synthetic polynucleotide
caaaggaatctataatcaagtatccgtcgttggataacctattatgataaataca

SEQ ID NO: 2503 - DNA, 55 bp, Artificial Sequence
  Synthetic polynucleotide
taatatattgcattcccaatatatcaccactggcgtcgtttataaaggaattaac

SEQ ID NO: 2504 - DNA, 55 bp, Artificial Sequence
  Synthetic polynucleotide
agttctaattggtaatcttcttccatttccaggcctattggaaacaagcatcttt

SEQ ID NO: 2505 - DNA, 55 bp, Artificial Sequence
  Synthetic polynucleotide
acctttataccgtaaacaatttgatatatttggcatcgttctccgtagcgtatga

SEQ ID NO: 2506 - DNA, 55 bp, Artificial Sequence
  Synthetic polynucleotide
aatagtttgtaccaatctgtgtggttaaaaaggttagacgttcccaaatgagtca

SEQ ID NO: 2507 - DNA, 55 bp, Artificial Sequence
  Synthetic polynucleotide
cccagatcgtaaaactcattgtgcgaattgtggagatttgtattaaccaataata

SEQ ID NO: 2508 - DNA, 55 bp, Artificial Sequence
  Synthetic polynucleotide
gcataaataaaattgccccgagaggtttagaggatcttcacttaacccacaacta

SEQ ID NO: 2509 - DNA, 55 bp, Artificial Sequence
  Synthetic polynucleotide
aagttatacttctttccaggtcccgtttgcaggtaccgagagctcttattaatat

SEQ ID NO: 2510 - DNA, 55 bp, Artificial Sequence
  Synthetic polynucleotide
ataattacgataaaaacaactggataagtctggaagcttttcacccggctcaaag

SEQ ID NO: 2511 - DNA, 55 bp, Artificial Sequence
  Synthetic polynucleotide
atcgggatttgatcatcactcaagggctataggcctttttactgcgtcaatatat

SEQ ID NO: 2512 - DNA, 55 bp, Artificial Sequence
  Synthetic polynucleotide
caaggagtactattatcttcacatggcatgtggcaaatatagtgtaacctcacag

SEQ ID NO: 2513 - DNA, 55 bp, Artificial Sequence
  Synthetic polynucleotide
tgttccgactaagtttcacaaaggttccaaaggaaattaaaccgcagtgtcaaga

SEQ ID NO: 2514 - DNA, 55 bp, Artificial Sequence
  Synthetic polynucleotide
aagtcaacattaatatctagatcccggttccggcacttgacataaatgagacctt

SEQ ID NO: 2515 - DNA, 55 bp, Artificial Sequence
  Synthetic polynucleotide
ttaacttcaggtccctcgcccaggaagtgaaggtcataataattaaatccgttta

SEQ ID NO: 2516 - DNA, 55 bp, Artificial Sequence
  Synthetic polynucleotide
agcatataaagtctctcacaatacgaacgaagggcgagttgtgtttatacgtaac

SEQ ID NO: 2517 - DNA, 55 bp, Artificial Sequence
  Synthetic polynucleotide
cctatattgattcatacagagacagtcgtccggattgaatttcaaaaccgggatt

SEQ ID NO: 2518 - DNA, 55 bp, Artificial Sequence
  Synthetic polynucleotide
cttttcggttaattgacttacacagacaacaggctataaatagagtctgatactc

SEQ ID NO: 2519 - DNA, 55 bp, Artificial Sequence
  Synthetic polynucleotide
ggaagagttttgaattcctaaatcctttcctggaggaagcgctagtagtcttggc

SEQ ID NO: 2520 - DNA, 55 bp, Artificial Sequence
  Synthetic polynucleotide
tttggatggactatcaccgttggcataaattggcaaagcctatcattccctacaa

SEQ ID NO: 2521 - DNA, 55 bp, Artificial Sequence
  Synthetic polynucleotide
aggcgaatgcagaatccccttggctttatatggcttagggtaataagagctcaat

SEQ ID NO: 2522 - DNA, 55 bp, Artificial Sequence
  Synthetic polynucleotide
tgagatttgtgagagccgggtctggcaatctggttataaccaaccaaattcagac

SEQ ID NO: 2523 - DNA, 55 bp, Artificial Sequence
  Synthetic polynucleotide
gaacgcactcatatagctgtggtcttacttaggaatggacttaagaagcgaggac

SEQ ID NO: 2524 - DNA, 55 bp, Artificial Sequence
  Synthetic polynucleotide
ttagtcactctgaatacgtttactatgtatggggacgctatccgccgctgaacat

SEQ ID NO: 2525 - DNA, 55 bp, Artificial Sequence
  Synthetic polynucleotide
ggtgtatgctaagtggccttcatctgtatctggacatagtaatttaagagagcac

SEQ ID NO: 2526 - DNA, 55 bp, Artificial Sequence
  Synthetic polynucleotide
ttgaactagactgcctccgtcatatcaatcaggaagtctactttcgcgacaatat

SEQ ID NO: 2527 - DNA, 55 bp, Artificial Sequence
  Synthetic polynucleotide
atgtacttacagtagacctgattagcaattaggcttctctatggtcgctcccacc

SEQ ID NO: 2528 - DNA, 55 bp, Artificial Sequence
  Synthetic polynucleotide
tcgaacattaaagtgactaaacagagcgagcggtctcaactgtcttatgatgtag

SEQ ID NO: 2529 - DNA, 55 bp, Artificial Sequence
  Synthetic polynucleotide
attcgttcttaactagcgctatttggaaggtggaacccatacacctttcgcgtga

SEQ ID NO: 2530 - DNA, 55 bp, Artificial Sequence
  Synthetic polynucleotide
ttcgaaattttatcaccctggcatagacataggtcattcgacgtctcatgcccgt

SEQ ID NO: 2531 - DNA, 55 bp, Artificial Sequence
  Synthetic polynucleotide
ttccgcgtaatagtaactcaacctcagcagtggaaaacggattttctgagactta

SEQ ID NO: 2532 - DNA, 55 bp, Artificial Sequence
  Synthetic polynucleotide
ttcttcacctacgtaactgacgagaaccgagggcaaatgtattgtttctgttagc

SEQ ID NO: 2533 - DNA, 55 bp, Artificial Sequence
  Synthetic polynucleotide
cacctttccagtttgactttaaacagcagctggggattagaagatcctaaaaacg

SEQ ID NO: 2534 - DNA, 55 bp, Artificial Sequence
  Synthetic polynucleotide
cgtggcaaatgatcatcttggacctaaatttggacaattcgtgtcacggggactc

SEQ ID NO: 2535 - DNA, 55 bp, Artificial Sequence
  Synthetic polynucleotide
tatgcatcgccctttgctcagacgtttctcaggtaaagcaaggtcccccaatagc

SEQ ID NO: 2536 - DNA, 55 bp, Artificial Sequence
  Synthetic polynucleotide
tgatgccgacaactttcttaggcgatttaaaggcgtgatgtccagcgcaagtcta

SEQ ID NO: 2537 - DNA, 55 bp, Artificial Sequence
  Synthetic polynucleotide
cccttagcccccgcatcgatcactgaaactgggagcagaaaggtacgtgtcgatc

SEQ ID NO: 2538 - DNA, 55 bp, Artificial Sequence
  Synthetic polynucleotide
tgtcgcctcctgaaaccctatgcaaatatgcggttgaaggtagctcatgtatagg

SEQ ID NO: 2539 - DNA, 55 bp, Artificial Sequence
  Synthetic polynucleotide
ggagtcgaagtgaggtcttacggcacatttaggcattttgggaggttcccttcct

SEQ ID NO: 2540 - DNA, 55 bp, Artificial Sequence
  Synthetic polynucleotide
cgcgagacaaggtccacaatcggtcttgatcggcgatatttagggcattgccctg

SEQ ID NO: 2541 - DNA, 55 bp, Artificial Sequence
  Synthetic polynucleotide
acttatcccgccaacacgcaagcatggttatggaaatagctcgttatacgggtgt

SEQ ID NO: 2542 - DNA, 55 bp, Artificial Sequence
  Synthetic polynucleotide
attctccctaagagttcggttgaggcaatacggcaaaagccttcccttgtcgatg

SEQ ID NO: 2543 - DNA, 55 bp, Artificial Sequence
  Synthetic polynucleotide
aaggacaaagtgaccccccacatatcggatcggcgaattttgtcgggtatggagt

SEQ ID NO: 2544 - DNA, 55 bp, Artificial Sequence
  Synthetic polynucleotide
gtcctctttgtcacaacctggatcaaggattggatctaggttaacctctgctctc

SEQ ID NO: 2545 - DNA, 55 bp, Artificial Sequence
  Synthetic polynucleotide
attacggcctcccataccctgttgacctgatggttgactagtggacagcgggtgt

SEQ ID NO: 2546 - DNA, 55 bp, Artificial Sequence
  Synthetic polynucleotide
cattgagctacatcatcatatagtgacgactgggccgagcgagggggcctcacaa

SEQ ID NO: 2547 - DNA, 55 bp, Artificial Sequence
  Synthetic polynucleotide
atatgcgagccttacacccccaatccgagatggaaatccgatagttcgtgtccac

SEQ ID NO: 2548 - DNA, 55 bp, Artificial Sequence
  Synthetic polynucleotide
gccaagataatcagcaccgataccgcgaagcggtaaatttgtttgactgtgccta

SEQ ID NO: 2549 - DNA, 55 bp, Artificial Sequence
  Synthetic polynucleotide
ggtgccactgagatgtcgacgaggctttcaaggccccccagaacctgcaggccga

SEQ ID NO: 2550 - DNA, 55 bp, Artificial Sequence
  Synthetic polynucleotide
tccacctgcttctagactcgaggaatttcgaggccccaggcctctccgccgggtg

SEQ ID NO: 2551 - DNA, 55 bp, Artificial Sequence
  Synthetic polynucleotide
gccacggggatccctcccctctgggcatttaggcattgtacacgtcctcacagcg

SEQ ID NO: 2552 - DNA, 55 bp, Artificial Sequence
  Synthetic polynucleotide
cccccggggtcgctccctgccggtaattacaggtaacttgactgacgagcgtagc

SEQ ID NO: 2553 - DNA, 55 bp, Artificial Sequence
  Synthetic polynucleotide
cgcttgccgacgcacgccctttctgcatctggggggtagaggtatcagtaccctg

SEQ ID NO: 2554 - DNA, 55 bp, Artificial Sequence
  Synthetic polynucleotide
cttcgccgttgctcatccccactctgctctgggaagggtgtcgacggggcaagtc

SEQ ID NO: 2555 - DNA, 55 bp, Artificial Sequence
  Synthetic polynucleotide
acatccctcccattgtcccccaccagctagcggataggggggctatgcctgctac

SEQ ID NO: 2556 - DNA, 55 bp, Artificial Sequence
  Synthetic polynucleotide
gcaccgcatccctctcctagagccatgtcatggttcttggtgcggaactcgggcc

SEQ ID NO: 2557 - DNA, 55 bp, Artificial Sequence
  Synthetic polynucleotide
cggggcaagatttaagctcgggaaaagtctcggccacgtcacgtcatggccgggc

SEQ ID NO: 2558 - DNA, 55 bp, Artificial Sequence
  Synthetic polynucleotide
aacctcttaggtacaccattagtgagtgagtgggcgcccctcaggcctcccccgc

SEQ ID NO: 2559 - DNA, 55 bp, Artificial Sequence
  Synthetic polynucleotide
cctcatgagcctttgtcatcgttccgacgaaggggactaggcatgccagggggcc

SEQ ID NO: 2560 - DNA, 55 bp, Artificial Sequence
  Synthetic polynucleotide
gagtgcacggtccggacaggaagaggcataaggctcctaccatccttaccgcccc

SEQ ID NO: 2561 - DNA, 55 bp, Artificial Sequence
  Synthetic polynucleotide
tcgcccagcacctagtccctaaatcaccacgggtgcgctgcggacgactagccca

SEQ ID NO: 2562 - DNA, 55 bp, Artificial Sequence
  Synthetic polynucleotide
tgccgctacgaccagtcgacaatgaaccaatggggcatgccccgggcatcgtgcg

SEQ ID NO: 2563 - DNA, 55 bp, Artificial Sequence
  Synthetic polynucleotide
ccggcttgattcactcctacgctaaaacgctggtacagttgggcgggccgtcgcc

SEQ ID NO: 2564 - DNA, 55 bp, Artificial Sequence
  Synthetic polynucleotide
aatcaaagattatactcccttaccttattacgggcaacgatgttattataattag

SEQ ID NO: 2565 - DNA, 55 bp, Artificial Sequence
  Synthetic polynucleotide
caacaatgattctaatctttaggtatttctaggattacaaagatctgccaaagta

SEQ ID NO: 2566 - DNA, 55 bp, Artificial Sequence
  Synthetic polynucleotide
ataatgctagaaacgacttgtacattaattaggtataacaagatcagaaagttta

SEQ ID NO: 2567 - DNA, 55 bp, Artificial Sequence
  Synthetic polynucleotide
ctttagttgtcaagaacatagcagctttcttggaatgtttatcaaaagtgatttt

SEQ ID NO: 2568 - DNA, 55 bp, Artificial Sequence
  Synthetic polynucleotide
cactcgaaataatctccaagattgtctttctggcaaattttaccataatttaaac

SEQ ID NO: 2569 - DNA, 55 bp, Artificial Sequence
  Synthetic polynucleotide
ttttttaagctcgtacctctaattgattattggtcataggtggtaactaatatct

SEQ ID NO: 2570 - DNA, 55 bp, Artificial Sequence
  Synthetic polynucleotide
gacaatttctgaaaatcactactgaaattctggtattacgccttctaataacaaa

SEQ ID NO: 2571 - DNA, 55 bp, Artificial Sequence
  Synthetic polynucleotide
cttatctacgatatctcaattagactatagagggttttattagaaggaatgactg

SEQ ID NO: 2572 - DNA, 55 bp, Artificial Sequence
  Synthetic polynucleotide
aaataagatgactttaccatcgtgtataaaaggtataactgttaaatttaaattg

SEQ ID NO: 2573 - DNA, 55 bp, Artificial Sequence
  Synthetic polynucleotide
ttacttcaccagatatcatgtgactaactatggttttttatagatcgtaagacct

SEQ ID NO: 2574 - DNA, 55 bp, Artificial Sequence
  Synthetic polynucleotide
atcgggggctgtatatcattcgatcaagattggtcaaaattttaatagagtttaa

SEQ ID NO: 2575 - DNA, 55 bp, Artificial Sequence
  Synthetic polynucleotide
agaatctttaaaatcacctccttatacccttggaatcattgtatgttgaaacatc

SEQ ID NO: 2576 - DNA, 55 bp, Artificial Sequence
  Synthetic polynucleotide
actagagatgatagtactagcacagaccagtgggtaaatttcatatattatatta

SEQ ID NO: 2577 - DNA, 55 bp, Artificial Sequence
  Synthetic polynucleotide
aacatattaactatgacaccgaaatacgaaaggtatatcgtagtttacgtttttg

SEQ ID NO: 2578 - DNA, 55 bp, Artificial Sequence
  Synthetic polynucleotide
aattaacaaaatttgacaaggcaacatcataggaattctgtgcgttactaaacag

SEQ ID NO: 2579 - DNA, 55 bp, Artificial Sequence
  Synthetic polynucleotide
ggcgtaatagcggcctctatttagtttattaggtcgtaaacaaatgctcgagtta

SEQ ID NO: 2580 - DNA, 55 bp, Artificial Sequence
  Synthetic polynucleotide
ttaaatagttccactgcaaccggcattattcggaaacagactttgtgatttctac

SEQ ID NO: 2581 - DNA, 55 bp, Artificial Sequence
  Synthetic polynucleotide
taggtagtacactgtacggacggattaattcggcaatatgcaataaagatctaac

SEQ ID NO: 2582 - DNA, 55 bp, Artificial Sequence
  Synthetic polynucleotide
tacgatgtcgacgctacatttccctagttagggtttattatggtttcaacagttg

SEQ ID NO: 2583 - DNA, 55 bp, Artificial Sequence
  Synthetic polynucleotide
gtataactctaccatgcaatggtcaaataatggcgtagagtcttctggaggaatt

SEQ ID NO: 2584 - DNA, 55 bp, Artificial Sequence
  Synthetic polynucleotide
catgtgcaggaaaaatcttggtcttagattagggacaagaacaaaggactattcg

SEQ ID NO: 2585 - DNA, 55 bp, Artificial Sequence
  Synthetic polynucleotide
atacttatctcgactgcaatacattgaaattgggaggcattgttcctgtaatcct

SEQ ID NO: 2586 - DNA, 55 bp, Artificial Sequence
  Synthetic polynucleotide
aatatctcatggagctcatagttcagctcaaggttcgtaattatcaggattgtga

SEQ ID NO: 2587 - DNA, 55 bp, Artificial Sequence
  Synthetic polynucleotide
agaggaaatatctaaacgctaaaggcatagagggtgtaatctattagttgcgacg

SEQ ID NO: 2588 - DNA, 55 bp, Artificial Sequence
  Synthetic polynucleotide
cttcaacccaacttggcccaaataaaggaagggttataactgtatcttcaacttg

SEQ ID NO: 2589 - DNA, 55 bp, Artificial Sequence
  Synthetic polynucleotide
actttctctatataaactttacttgtgcggtggatcttcggttcaacgttataac

SEQ ID NO: 2590 - DNA, 55 bp, Artificial Sequence
  Synthetic polynucleotide
agtaatacttatacgacatcacactagagtaggaatatgcttgtagcgtcctgta

SEQ ID NO: 2591 - DNA, 55 bp, Artificial Sequence
  Synthetic polynucleotide
cttatacttacgtgaactatgtgacaacagtggtaaaattcgacgccttagccaa

SEQ ID NO: 2592 - DNA, 55 bp, Artificial Sequence
  Synthetic polynucleotide
tataatgacaagatcacttaaggtcactgtaggtacattttaggaggcaaatgtt

SEQ ID NO: 2593 - DNA, 55 bp, Artificial Sequence
  Synthetic polynucleotide
aatttttaactatatgcttagcagactggcaggaccgttgtaactaaaggtatat

SEQ ID NO: 2594 - DNA, 55 bp, Artificial Sequence
  Synthetic polynucleotide
atagttggcagtccttctggtactgtttaatggtagcattcgtttctatgagccc

SEQ ID NO: 2595 - DNA, 55 bp, Artificial Sequence
  Synthetic polynucleotide
tttagttctctatattctttacacctttcacggtactcgccatcggaaggagcta

SEQ ID NO: 2596 - DNA, 55 bp, Artificial Sequence
  Synthetic polynucleotide
tgctaaggatgttgtgcccctctttcttctaggcaaacatagactggtaggctat

SEQ ID NO: 2597 - DNA, 55 bp, Artificial Sequence
  Synthetic polynucleotide
gtatttgattcgactacctattggcctttgtggcaaaccgaatagagttcactgt

SEQ ID NO: 2598 - DNA, 55 bp, Artificial Sequence
  Synthetic polynucleotide
tttaggtaccacatacctgcaagcttactttgggtgaacgatgataaactacctc

SEQ ID NO: 2599 - DNA, 55 bp, Artificial Sequence
  Synthetic polynucleotide
atttttcatatccgatcgtacgtactttcgtggaagctggttaaatgcgatcgtc

SEQ ID NO: 2600 - DNA, 55 bp, Artificial Sequence
  Synthetic polynucleotide
actatgtaaaacattacaataatgctgactggggtgaggtgatcgcagtcgtgta

SEQ ID NO: 2601 - DNA, 55 bp, Artificial Sequence
  Synthetic polynucleotide
ccataccgagatgtctctctcgaggtctcacggttataacatctaattcactaat

SEQ ID NO: 2602 - DNA, 55 bp, Artificial Sequence
  Synthetic polynucleotide
tggtgtaaaagtgaagcaagagcggtaatcgggtattcgtgtgattattttctcc

SEQ ID NO: 2603 - DNA, 55 bp, Artificial Sequence
  Synthetic polynucleotide
gatgagcctgattagcctaccaactcgaatcggcatagtaagttcataaagtact

SEQ ID NO: 2604 - DNA, 55 bp, Artificial Sequence
  Synthetic polynucleotide
tacgccgattaaactgcagcatcatgatgaaggattcgttccattcgttaaaagg

SEQ ID NO: 2605 - DNA, 55 bp, Artificial Sequence
  Synthetic polynucleotide
tatcataatcagtatcctattctatcgtgtcggtttgaggatatcacagccggag

SEQ ID NO: 2606 - DNA, 55 bp, Artificial Sequence
  Synthetic polynucleotide
actgattaggtgaacccgcagttataacgctggagtgattcaggtattcacctct

SEQ ID NO: 2607 - DNA, 55 bp, Artificial Sequence
  Synthetic polynucleotide
tcatcccccataagaactacagttacccagtgggagcacagggttaaaaagcttt

SEQ ID NO: 2608 - DNA, 55 bp, Artificial Sequence
  Synthetic polynucleotide
taatccggtaacaccgcaataaagacaggacggttattctaccagtcccttacgt

SEQ ID NO: 2609 - DNA, 55 bp, Artificial Sequence
  Synthetic polynucleotide
tgatacccggacactcctcgtgcgatttagtggattcttcagctattgcacacgt

SEQ ID NO: 2610 - DNA, 55 bp, Artificial Sequence
  Synthetic polynucleotide
ggcttgcagcaattctcattcggctaaaatcgggaagtgaacatgtggtgcaacg

SEQ ID NO: 2611 - DNA, 55 bp, Artificial Sequence
  Synthetic polynucleotide
agccgcatgacctttacagactgtatttactgggtgatccggcttagcctctctt

SEQ ID NO: 2612 - DNA, 55 bp, Artificial Sequence
  Synthetic polynucleotide
gatcttcagttcgagcctttcatggtaacctggacctgccttacatccgcgtcgg

SEQ ID NO: 2613 - DNA, 55 bp, Artificial Sequence
  Synthetic polynucleotide
gtcctgtcggtgaagcccccgatgtagtataggaaatcaatactacctccttcgt

SEQ ID NO: 2614 - DNA, 55 bp, Artificial Sequence
  Synthetic polynucleotide
agtgatctagcgccgacattagcgatattgcggtatctgttcacaaacagcgacg

SEQ ID NO: 2615 - DNA, 55 bp, Artificial Sequence
  Synthetic polynucleotide
cggtgcagcaccctaacacgcttaagagctaggggttgcgccagaccacgttaac

SEQ ID NO: 2616 - DNA, 55 bp, Artificial Sequence
  Synthetic polynucleotide
acctttccgttacctgcgcttgcgactaactggttcagataatccactatgagga

SEQ ID NO: 2617 - DNA, 55 bp, Artificial Sequence
  Synthetic polynucleotide
ctagctccaacagtaaccagtgcattaccagggaaatcgagtctccctcttcgtc

SEQ ID NO: 2618 - DNA, 55 bp, Artificial Sequence
  Synthetic polynucleotide
tagggctaggctcgcactttcctacctaccgggagagaggtagtgggagcgtaga

SEQ ID NO: 2619 - DNA, 55 bp, Artificial Sequence
  Synthetic polynucleotide
gcgtgcatcccccttcccatgtcgcacggaaggtcggaaaatgcaagcgacctac

SEQ ID NO: 2620 - DNA, 55 bp, Artificial Sequence
  Synthetic polynucleotide
tcacatttcccgtacactctgatgattcggaggatttcaaccgccccctgaccca

SEQ ID NO: 2621 - DNA, 55 bp, Artificial Sequence
  Synthetic polynucleotide
cgttatagccaacctactactctgaccagacggcaaaaagtgctgggagtacgtt

SEQ ID NO: 2622 - DNA, 55 bp, Artificial Sequence
  Synthetic polynucleotide
gtagattccgacacacccagcatcatcagcaggggagtaaagcggacctgtgtgt

SEQ ID NO: 2623 - DNA, 55 bp, Artificial Sequence
  Synthetic polynucleotide
ggcccaccctcgcctgctatgttccaacaaaggcataatcgacgaccctgcgttt

SEQ ID NO: 2624 - DNA, 55 bp, Artificial Sequence
  Synthetic polynucleotide
ggcgcgggctctcaccccgcctcggtatttaggtttagctgcgcagcagcgcctg

SEQ ID NO: 2625 - DNA, 55 bp, Artificial Sequence
  Synthetic polynucleotide
cgcgactgcactggcgcacgaggcggttctaggttccccccaccttcccctaggg

SEQ ID NO: 2626 - DNA, 55 bp, Artificial Sequence
  Synthetic polynucleotide
gcagtgacaccccttccatcgccactttcggggcgggaatggaaggcctctcgct

SEQ ID NO: 2627 - DNA, 55 bp, Artificial Sequence
  Synthetic polynucleotide
cggtatcggctcctcccgtgccactttccaaggagggcaaagagcgtatcggtcc

SEQ ID NO: 2628 - DNA, 55 bp, Artificial Sequence
  Synthetic polynucleotide
cggcaaacgtcgccagctgttagtcatttagggtgaggctcggcgggcccacgcc

SEQ ID NO: 2629 - DNA, 55 bp, Artificial Sequence
  Synthetic polynucleotide
acggcccctcgcgcaacggcggtttctaaagggtctttctcgaaagaacgcggcg

SEQ ID NO: 2630 - DNA, 55 bp, Artificial Sequence
  Synthetic polynucleotide
ctcgtacctctcccaacactcaccgtccgttgggtggggaggcgcagactctgcc

SEQ ID NO: 2631 - DNA, 55 bp, Artificial Sequence
  Synthetic polynucleotide
tgcaacggtccttccactgttacgatcgatgggctggggggcaggggtgccgcgg

SEQ ID NO: 2632 - DNA, 55 bp, Artificial Sequence
  Synthetic polynucleotide
ttgctgccgccgccgccctccatccatgtggggtccatgcactttggcacgttca

SEQ ID NO: 2633 - DNA, 55 bp, Artificial Sequence
  Synthetic polynucleotide
agatggttcgagcaacctacctacgccgcaagggaggggcgagtgtggggaggga

SEQ ID NO: 2634 - DNA, 55 bp, Artificial Sequence
  Synthetic polynucleotide
cgcccgactgcacatgctccccgactaagtaggactaggcggccagttcgtcgtt

SEQ ID NO: 2635 - DNA, 55 bp, Artificial Sequence
  Synthetic polynucleotide
agctccctccccctctccagctgcccctgcgggttcggacgaattaggtcgttgg

SEQ ID NO: 2636 - DNA, 55 bp, Artificial Sequence
  Synthetic polynucleotide
gcagccgcactgtcgactcttctaaaccgacggatcagtggggaggcacgcacct

SEQ ID NO: 2637 - DNA, 55 bp, Artificial Sequence
  Synthetic polynucleotide
accgccctcaacgcaccgtaagaacaaagaaggctaggggccggggcctttcagg

SEQ ID NO: 2638 - DNA, 55 bp, Artificial Sequence
  Synthetic polynucleotide
agtgcatgcaaacgcccctttatacatcggcggacatcggtggccggggcaggcc

SEQ ID NO: 2639 - DNA, 55 bp, Artificial Sequence
  Synthetic polynucleotide
atgtgaaatataaataccgcgatctttatttggaaacctctaacttttagttgca

SEQ ID NO: 2640 - DNA, 55 bp, Artificial Sequence
  Synthetic polynucleotide
agcatactaagaacatcgcctgaaataatgaggtttaaatggacacaaaagtaat

SEQ ID NO: 2641 - DNA, 55 bp, Artificial Sequence
  Synthetic polynucleotide
ttaattttcttctatcctacttgatattatagggttgctgttggatcctagatca

SEQ ID NO: 2642 - DNA, 55 bp, Artificial Sequence
  Synthetic polynucleotide
catatgaattcatcaacattgtcttcttatagggtctcaatttaaggatagcaca

SEQ ID NO: 2643 - DNA, 55 bp, Artificial Sequence
  Synthetic polynucleotide
ctgaacaatctttatgctcatgcaataatacggtcatggtatctattaaaaggat

SEQ ID NO: 2644 - DNA, 55 bp, Artificial Sequence
  Synthetic polynucleotide
atataatgaagcatgtcagtaaacgaattttggcgattttacgactaactggaat

SEQ ID NO: 2645 - DNA, 55 bp, Artificial Sequence
  Synthetic polynucleotide
ttcaaagcatgactatcaatatggtggaatcggaattacaaagtcttgaaaagta

SEQ ID NO: 2646 - DNA, 55 bp, Artificial Sequence
  Synthetic polynucleotide
taacttgtccagatgtccagttaacaaatacggttaataactaactattgtactt

SEQ ID NO: 2647 - DNA, 55 bp, Artificial Sequence
  Synthetic polynucleotide
acttcataaatataatctagcaaatttcaagggaaatacaacgatattctttcta

SEQ ID NO: 2648 - DNA, 55 bp, Artificial Sequence
  Synthetic polynucleotide
aaatcggaatttgactcggattaccagacatggatataaagagtagaatatgatt

SEQ ID NO: 2649 - DNA, 55 bp, Artificial Sequence
  Synthetic polynucleotide
cattccaatgtttatcctgtaatgcaagtatggaatgggacatttctaattattc

SEQ ID NO: 2650 - DNA, 55 bp, Artificial Sequence
  Synthetic polynucleotide
ggacaatttaaattatccatgcataaaagcggggtaaacataattaaacataata

SEQ ID NO: 2651 - DNA, 55 bp, Artificial Sequence
  Synthetic polynucleotide
atagtttgaataacatcgactatacaagaagggtacatttgcaaagtgcatcaat

SEQ ID NO: 2652 - DNA, 55 bp, Artificial Sequence
  Synthetic polynucleotide
aacatctttaaatgcccagtgaaagaccagaggtattattacgataaaaatcgaa

SEQ ID NO: 2653 - DNA, 55 bp, Artificial Sequence
  Synthetic polynucleotide
taagtgtaaagtaatgctatagtaaaacgtagggagaactatttctatttcaagg

SEQ ID NO: 2654 - DNA, 55 bp, Artificial Sequence
  Synthetic polynucleotide
tagctcaacctacatccgtaaaggttatttaggagtaaaaggactgatgaataat

SEQ ID NO: 2655 - DNA, 55 bp, Artificial Sequence
  Synthetic polynucleotide
atcgagtattagaattctgcgtccatattaaggcgttacggtacttttccaagaa

SEQ ID NO: 2656 - DNA, 55 bp, Artificial Sequence
  Synthetic polynucleotide
ttaccacttgattattcaatgactttaactcggctgatggtcatccaatggacac

SEQ ID NO: 2657 - DNA, 55 bp, Artificial Sequence
  Synthetic polynucleotide
catagaggctcatactcactagttgtttagcggacactcttaaaaaattcggcta

SEQ ID NO: 2658 - DNA, 55 bp, Artificial Sequence
  Synthetic polynucleotide
caccaaactaagatgccccattgcacaaattggtgttgattagaacatcattgaa

SEQ ID NO: 2659 - DNA, 55 bp, Artificial Sequence
  Synthetic polynucleotide
atcatcttgatacatccgaatcgcataatgcgggttggttagccatctaaattgt

SEQ ID NO: 2660 - DNA, 55 bp, Artificial Sequence
  Synthetic polynucleotide
ttaacaaagaaatagccctgtcaggctatacgggtattcatggaaatctcttttg

SEQ ID NO: 2661 - DNA, 55 bp, Artificial Sequence
  Synthetic polynucleotide
tcccgaaaataaagtccaacgttagatatgaggatttgttcactttttacctatg

SEQ ID NO: 2662 - DNA, 55 bp, Artificial Sequence
  Synthetic polynucleotide
tacttatccccaacttcccgaaatgcggttaggtgctgttaaaccaattatttct

SEQ ID NO: 2663 - DNA, 55 bp, Artificial Sequence
  Synthetic polynucleotide
catcgtaagttcaaatccgtcttacaagaacggatacaacatatatatgtttacc

SEQ ID NO: 2664 - DNA, 55 bp, Artificial Sequence
  Synthetic polynucleotide
attttctattgtcagtcaggaatccgaaacaggcctaacttatcttgaaactaag

SEQ ID NO: 2665 - DNA, 55 bp, Artificial Sequence
  Synthetic polynucleotide
ttaaccatcagaacccctcgatgtttgctaagggtttagataaacgcatattggt

SEQ ID NO: 2666 - DNA, 55 bp, Artificial Sequence
  Synthetic polynucleotide
ttagctatagataagtcaatctagctgtgatggcggtacggcataaagtattcga

SEQ ID NO: 2667 - DNA, 55 bp, Artificial Sequence
  Synthetic polynucleotide
attatatagattacttcctgatcacaagactgggtatgatcaggcttctcgtgtt

SEQ ID NO: 2668 - DNA, 55 bp, Artificial Sequence
  Synthetic polynucleotide
aattcagcagtatcctccgagaacttgggttggtatattgatgtaaatggtagag

SEQ ID NO: 2669 - DNA, 55 bp, Artificial Sequence
  Synthetic polynucleotide
tctgggtactatatatcgtttactatttaccggcgatccggtgtatgacccaatc

SEQ ID NO: 2670 - DNA, 55 bp, Artificial Sequence
  Synthetic polynucleotide
gccatgaaccgacactcgttggctttaaatgggggtagtaattacacttgaatta

SEQ ID NO: 2671 - DNA, 55 bp, Artificial Sequence
  Synthetic polynucleotide
cttttgaaacctgggactgaagggatttagaggttagtccacacaccacaacagt

SEQ ID NO: 2672 - DNA, 55 bp, Artificial Sequence
  Synthetic polynucleotide
atccccagaactgacgcatactgggtaataaggagtcacgaatacttcagtagtg

SEQ ID NO: 2673 - DNA, 55 bp, Artificial Sequence
  Synthetic polynucleotide
ccgattgaactcctttcggtttagtctaaccggtcaatagcatatgtaaacttcg

SEQ ID NO: 2674 - DNA, 55 bp, Artificial Sequence
  Synthetic polynucleotide
tgcccacttactttctcgctttcattctcagggaggctattaagttcatcggcat

SEQ ID NO: 2675 - DNA, 55 bp, Artificial Sequence
  Synthetic polynucleotide
gaaacatacttacgttcccgattactatacgggcgagggtctaaaggaaatgtca

SEQ ID NO: 2676 - DNA, 55 bp, Artificial Sequence
  Synthetic polynucleotide
cgaccgtagcaagaatcaacacttacaaaccgggtctgtgggaataacgcaaata

SEQ ID NO: 2677 - DNA, 55 bp, Artificial Sequence
  Synthetic polynucleotide
aatatctgaagcttaacagcggagtactcaggggatccaagatgtctgcatgatc

SEQ ID NO: 2678 - DNA, 55 bp, Artificial Sequence
  Synthetic polynucleotide
tgtggacttaacaggaccgttgtagttagccggactatatttcgagaactctttg

SEQ ID NO: 2679 - DNA, 55 bp, Artificial Sequence
  Synthetic polynucleotide
agggtgtttacattaacgatcaaccatagccggcccgatttgttttaagcacaat

SEQ ID NO: 2680 - DNA, 55 bp, Artificial Sequence
  Synthetic polynucleotide
ttgtactccacatccgctcagacaggtgaatggatagtcgtgaaagatcgtataa

SEQ ID NO: 2681 - DNA, 55 bp, Artificial Sequence
  Synthetic polynucleotide
tcgctattaaaacgcacaacagatttcagaagggtctgcaggacaagcttagaat

SEQ ID NO: 2682 - DNA, 55 bp, Artificial Sequence
  Synthetic polynucleotide
cttatcctatacgcaccaagtgatgattgttggataatggttctaccgtaagccc

SEQ ID NO: 2683 - DNA, 55 bp, Artificial Sequence
  Synthetic polynucleotide
tgaattctgtgagactccacacgtaaacggtggttcgttaatcagaatgggtttc

SEQ ID NO: 2684 - DNA, 55 bp, Artificial Sequence
  Synthetic polynucleotide
caagtaccccaccatgcccgatggaattaaaggacttcggggtcagtctaagtgc

SEQ ID NO: 2685 - DNA, 55 bp, Artificial Sequence
  Synthetic polynucleotide
acttactcgcatcatgctcggccctattatgggtttttccaggttggtcggggtc

SEQ ID NO: 2686 - DNA, 55 bp, Artificial Sequence
  Synthetic polynucleotide
taatagaatcgcatacctatccgtttattatgggggcacttgcaagggtgggcca

SEQ ID NO: 2687 - DNA, 55 bp, Artificial Sequence
  Synthetic polynucleotide
gcgtcgaccagtaaccccaatcgtttctttaggaaaagtacacttaccgacccgt

SEQ ID NO: 2688 - DNA, 55 bp, Artificial Sequence
  Synthetic polynucleotide
cgtaggtaatcaggtgcgcgccgtcgattacggaaaattcttacacaattcactg

SEQ ID NO: 2689 - DNA, 55 bp, Artificial Sequence
  Synthetic polynucleotide
aggggactacagcagacgttcggggaaatttggctgacgtacaaagataaaggtc

SEQ ID NO: 2690 - DNA, 55 bp, Artificial Sequence
  Synthetic polynucleotide
ggaggatccagttatacacggcaatttacctggcgatgtcgctaagtttagcaca

SEQ ID NO: 2691 - DNA, 55 bp, Artificial Sequence
  Synthetic polynucleotide
cctcctgtttcggggccaaccggtgaaaacaggagataacattctcacaaagtca

SEQ ID NO: 2692 - DNA, 55 bp, Artificial Sequence
  Synthetic polynucleotide
cgcaaacaatagcacgcaaaaaaggttctccgggtaaagagtcggcggaacgtag

SEQ ID NO: 2693 - DNA, 55 bp, Artificial Sequence
  Synthetic polynucleotide
tatacagaagtgcattctgagtcaggaccctggccaccctttctacggtgtcaat

SEQ ID NO: 2694 - DNA, 55 bp, Artificial Sequence
  Synthetic polynucleotide
gcgatgaacttacccgccataacgccgcatagggatagtttctcggggtggttct

SEQ ID NO: 2695 - DNA, 55 bp, Artificial Sequence
  Synthetic polynucleotide
tcgtcgccccgagagtccagtatgttaggatggttgctcaaactctatccgaccg

SEQ ID NO: 2696 - DNA, 55 bp, Artificial Sequence
  Synthetic polynucleotide
tagtacaagtcataccctaacgatcacacgggggtaggtgcaaccgacaggtttg

SEQ ID NO: 2697 - DNA, 55 bp, Artificial Sequence
  Synthetic polynucleotide
tctgccatatttaaggcgacgttatatcgctggcctcgaggacatcctgccgtct

SEQ ID NO: 2698 - DNA, 55 bp, Artificial Sequence
  Synthetic polynucleotide
aaggcatgcggtacttcaaattgacactgaagggcagctccccgtgggcctgcat

SEQ ID NO: 2699 - DNA, 55 bp, Artificial Sequence
  Synthetic polynucleotide
tcgtcgccccggttggctttcctacttctaaggaaagcgtccctcgagcggtgcg

SEQ ID NO: 2700 - DNA, 55 bp, Artificial Sequence
  Synthetic polynucleotide
cgcccaagaaggcatccgtgttctatttctggggcttgagcagcgccgcggtccc

SEQ ID NO: 2701 - DNA, 55 bp, Artificial Sequence
  Synthetic polynucleotide
aaagcccagcctttcgcccttcgtctttcatggcaacgtgagggcagccggcccg

SEQ ID NO: 2702 - DNA, 55 bp, Artificial Sequence
  Synthetic polynucleotide
gctacgcatctgccctcgggacgcgtctaagggtagaaagaatgtccccctcggg

SEQ ID NO: 2703 - DNA, 55 bp, Artificial Sequence
  Synthetic polynucleotide
gggcgcttcctcgtctctcatacggcaattgggagacgagaccgccccacccgga

SEQ ID NO: 2704 - DNA, 55 bp, Artificial Sequence
  Synthetic polynucleotide
gcttgcgagttccgtccgctgtgtcatacagggatcacggaacgggtggggtccc

SEQ ID NO: 2705 - DNA, 55 bp, Artificial Sequence
  Synthetic polynucleotide
cagccccacgggccgtcgcattggtccaaatggaagtgatcgctcctgagcgacc

SEQ ID NO: 2706 - DNA, 55 bp, Artificial Sequence
  Synthetic polynucleotide
gcgccggcgtgctgcccctggagttcacataggggacttcacgattacctcagcg

SEQ ID NO: 2707 - DNA, 55 bp, Artificial Sequence
  Synthetic polynucleotide
acccgcctcaagcacgcgacgctgcaatactggaggtcaggattcagccgggctc

SEQ ID NO: 2708 - DNA, 55 bp, Artificial Sequence
  Synthetic polynucleotide
cctatggctgtgcgcgcttcctacgatagagggatgtcggggcgggggttgccca

SEQ ID NO: 2709 - DNA, 55 bp, Artificial Sequence
  Synthetic polynucleotide
ctctcccctcgcactacagctcttcacgcaggggaactgaactcggagcgcaggc

SEQ ID NO: 2710 - DNA, 55 bp, Artificial Sequence
  Synthetic polynucleotide
tctgggaggtcctccacttgccactacaacgggtgggtcgtcggttcccctgggt

SEQ ID NO: 2711 - DNA, 55 bp, Artificial Sequence
  Synthetic polynucleotide
agtgtgtaccatacccccgaactacaccgcgggggacgtgcgcatgccgcccact

SEQ ID NO: 2712 - DNA, 55 bp, Artificial Sequence
  Synthetic polynucleotide
ggacccactccttgagcaatcacgtacgtgtggtcgttggccctacgttgcccgc

SEQ ID NO: 2713 - DNA, 55 bp, Artificial Sequence
  Synthetic polynucleotide
tcgaaggcagagtagcccgtgactcaacgttggtctggggtagcgccgtccatgc

SEQ ID NO: 2714 - DNA, 55 bp, Artificial Sequence
  Synthetic polynucleotide
gagttgaaagaagatacattaaactttattcggtgattcactgatcaacatcgtt

SEQ ID NO: 2715 - DNA, 55 bp, Artificial Sequence
  Synthetic polynucleotide
atgccacagctattatctgtaagattaaattggtaacacgctgtacttaaatttc

SEQ ID NO: 2716 - DNA, 55 bp, Artificial Sequence
  Synthetic polynucleotide
ttctcattgcgattcgcatatctaatttaaaggcaaaattgcaaagcagcttttt

SEQ ID NO: 2717 - DNA, 55 bp, Artificial Sequence
  Synthetic polynucleotide
tcttattttcaatgtaccggagctaatttcagggatcttcaaaataggatttaca

SEQ ID NO: 2718 - DNA, 55 bp, Artificial Sequence
  Synthetic polynucleotide
gggaataatttatcctcacttcttgctgtttgggtttggttatgaattatcaaaa

SEQ ID NO: 2719 - DNA, 55 bp, Artificial Sequence
  Synthetic polynucleotide
tagttcaaactaaacgcttcacggttatagaggaattttagtttttccgttattt

SEQ ID NO: 2720 - DNA, 55 bp, Artificial Sequence
  Synthetic polynucleotide
ctatttttttttgattccagggaaattacgtggctattgatcaaatttatgtaca

SEQ ID NO: 2721 - DNA, 55 bp, Artificial Sequence
  Synthetic polynucleotide
ttacttaattttagagcattatccaaagaatggaaattccgaactgtatctcatc

SEQ ID NO: 2722 - DNA, 55 bp, Artificial Sequence
  Synthetic polynucleotide
atttgctaattctaatcataacataatatatggtttgacatcggtatcccaaatg

SEQ ID NO: 2723 - DNA, 55 bp, Artificial Sequence
  Synthetic polynucleotide
ttctaagattgtattacgtcaagtatatgcaggtacctactcgtgaaattttatc

SEQ ID NO: 2724 - DNA, 55 bp, Artificial Sequence
  Synthetic polynucleotide
atcatctttaaataacctggttagaaacacagggtgctagatgatttaataattg

SEQ ID NO: 2725 - DNA, 55 bp, Artificial Sequence
  Synthetic polynucleotide
aagggcaagcgttattcatatatagaggaatggccgtaaaattatgtgttaataa

SEQ ID NO: 2726 - DNA, 55 bp, Artificial Sequence
  Synthetic polynucleotide
gttggaatatgaatgtccaataaattgtgatggctactatagatcccaatacaaa

SEQ ID NO: 2727 - DNA, 55 bp, Artificial Sequence
  Synthetic polynucleotide
aaaaaggtttaaacttcgagatttaactgtcggaattgtgatttgaatcgcatta

SEQ ID NO: 2728 - DNA, 55 bp, Artificial Sequence
  Synthetic polynucleotide
ttctaatgaatatgaacaacagaagattgttggacacctagttaccatagatctt

SEQ ID NO: 2729 - DNA, 55 bp, Artificial Sequence
  Synthetic polynucleotide
ctgcaatctacaaactcagctgcttaaatttggtatcttacctaacaacgctttg

SEQ ID NO: 2730 - DNA, 55 bp, Artificial Sequence
  Synthetic polynucleotide
tatatcaaataatgtactcttgctgaatttcggatgggtgtattacgaacccagc

SEQ ID NO: 2731 - DNA, 55 bp, Artificial Sequence
  Synthetic polynucleotide
cagccaatcagctctacttctatattattcaggaaatatggcacactctagagta

SEQ ID NO: 2732 - DNA, 55 bp, Artificial Sequence
  Synthetic polynucleotide
gagctttttatatgcgctgacctttaatcttgggggcaatagtgatatgtgagtt

SEQ ID NO: 2733 - DNA, 55 bp, Artificial Sequence
  Synthetic polynucleotide
ggttacccacatcggtcgatttatcgttctgggtaaaatacttaagattaggaag

SEQ ID NO: 2734 - DNA, 55 bp, Artificial Sequence
  Synthetic polynucleotide
atattctttaaacaggccgtacggaaatttagggttctctcatgtttagccggaa

SEQ ID NO: 2735 - DNA, 55 bp, Artificial Sequence
  Synthetic polynucleotide
tgcctgctgcctactacaaggttctcaatccggataatgattttcatctttctta

SEQ ID NO: 2736 - DNA, 55 bp, Artificial Sequence
  Synthetic polynucleotide
ctgcgttaattaaggacccaaacgaatacaaggtcgccttagtatttctaagtga

SEQ ID NO: 2737 - DNA, 55 bp, Artificial Sequence
  Synthetic polynucleotide
cggaacttcgtctcatcaggggaatgcttaaggtttatggtagatagtcatatta

SEQ ID NO: 2738 - DNA, 55 bp, Artificial Sequence
  Synthetic polynucleotide
gctaattcttatatttcctatctctctcgatggtaggctcggcactgacttttaa

SEQ ID NO: 2739 - DNA, 55 bp, Artificial Sequence
  Synthetic polynucleotide
atacacattgagtataccacatcccgtgttaggatctgccgaatgtttacttgtt

SEQ ID NO: 2740 - DNA, 55 bp, Artificial Sequence
  Synthetic polynucleotide
aggtctattacatgtactaattctagcatcggggggataaaaattctatgtttag

SEQ ID NO: 2741 - DNA, 55 bp, Artificial Sequence
  Synthetic polynucleotide
tactcaaagaacctgccggatgatgacatttggaacttatttctcaaccgatatg

SEQ ID NO: 2742 - DNA, 55 bp, Artificial Sequence
  Synthetic polynucleotide
caatgaaatggtatggcttgataatcacgctggttagaatacgctcagatttatc

SEQ ID NO: 2743 - DNA, 55 bp, Artificial Sequence
  Synthetic polynucleotide
ttatgagatccgataacggtatagaactgcaggatcatccaatttttgttaagaa

SEQ ID NO: 2744 - DNA, 55 bp, Artificial Sequence
  Synthetic polynucleotide
gttctcttacaattggcagtcctttaaatttggacactttgatggacaccgtctg

SEQ ID NO: 2745 - DNA, 55 bp, Artificial Sequence
  Synthetic polynucleotide
aaacgcggtctttgttctacctagttaataaggtcaaagtgcaggatggagttag

SEQ ID NO: 2746 - DNA, 55 bp, Artificial Sequence
  Synthetic polynucleotide
tcagagcgttcgacagctgcattaataattcggtagtagcttgcatggtcagtga

SEQ ID NO: 2747 - DNA, 55 bp, Artificial Sequence
  Synthetic polynucleotide
tagaatgtttattctccaactacccaaaacggggaatgccaatagacttagccgg

SEQ ID NO: 2748 - DNA, 55 bp, Artificial Sequence
  Synthetic polynucleotide
tcctttcacagtacagcgactaataattatcggatgcgggcaattattgggatac

SEQ ID NO: 2749 - DNA, 55 bp, Artificial Sequence
  Synthetic polynucleotide
tgtctttcattacctcctcatcctgatcttaggaggctactacggtagttgcaac

SEQ ID NO: 2750 - DNA, 55 bp, Artificial Sequence
  Synthetic polynucleotide
tagcttgggttccgctcgtattgaacgtacaggactttggtgtgttttagcttac

SEQ ID NO: 2751 - DNA, 55 bp, Artificial Sequence
  Synthetic polynucleotide
aaacagcacacagcaccctaggtcacaatctggaatttgcaagttctacgttagg

SEQ ID NO: 2752 - DNA, 55 bp, Artificial Sequence
  Synthetic polynucleotide
cgagtcgttacatccacttcgtaaacatactggaagaggtcacctaattggcata

SEQ ID NO: 2753 - DNA, 55 bp, Artificial Sequence
  Synthetic polynucleotide
acggtatttatcggtacgtcactatctcaatggaagagtgctcagtctgtgtaag

SEQ ID NO: 2754 - DNA, 55 bp, Artificial Sequence
  Synthetic polynucleotide
attaaacattagcggccactcccgagtataaggtatggagcatacactacgttgg

SEQ ID NO: 2755 - DNA, 55 bp, Artificial Sequence
  Synthetic polynucleotide
tagtctatatgaacatctacggacaaaccgtggcactccgttgttgagctgttga

SEQ ID NO: 2756 - DNA, 55 bp, Artificial Sequence
  Synthetic polynucleotide
ctatagataatggcttcatgatttctccgcaggaccctaaaccgtgctatcgatc

SEQ ID NO: 2757 - DNA, 55 bp, Artificial Sequence
  Synthetic polynucleotide
cacattatatcttgggcacataattaccgatggatacgtgatggcgatagtgcca

SEQ ID NO: 2758 - DNA, 55 bp, Artificial Sequence
  Synthetic polynucleotide
tttattgttcaaagcacggataaccacggttggtagacgtaggcattctacaaca

SEQ ID NO: 2759 - DNA, 55 bp, Artificial Sequence
  Synthetic polynucleotide
ataccgagctgctttccaaaaggctttatccggaagagttcgaacgtcatcgggc

SEQ ID NO: 2760 - DNA, 55 bp, Artificial Sequence
  Synthetic polynucleotide
caagagatcccaatggcgcggcccttatttggggtttctataactgaactctact

SEQ ID NO: 2761 - DNA, 55 bp, Artificial Sequence
  Synthetic polynucleotide
ctgaagttgtaaccctctggttatgtatttaggccactagggcgagttttgggac

SEQ ID NO: 2762 - DNA, 55 bp, Artificial Sequence
  Synthetic polynucleotide
cgttgaatcgtgagaacgcggtctataactggggacactgactgatcctacgact

SEQ ID NO: 2763 - DNA, 55 bp, Artificial Sequence
  Synthetic polynucleotide
cacctttaaccccccccttgtctcctgatttggcaagatcactaagttagtaggt

SEQ ID NO: 2764 - DNA, 55 bp, Artificial Sequence
  Synthetic polynucleotide
cgtgtgttccaccgtgctgtggtcacataatggcttttctctcacgatggcccga

SEQ ID NO: 2765 - DNA, 55 bp, Artificial Sequence
  Synthetic polynucleotide
caccaccctaataaaacgaattgatagttacgggcacggtgggctggcgatggtc

SEQ ID NO: 2766 - DNA, 55 bp, Artificial Sequence
  Synthetic polynucleotide
ccatgactcatccccacaactaagtcaatacggtggtctcgggtaagcgcgatac

SEQ ID NO: 2767 - DNA, 55 bp, Artificial Sequence
  Synthetic polynucleotide
agctgtcacgatttagcacgaaagtttgccaggacagtatagcgtacgtgatagc

SEQ ID NO: 2768 - DNA, 55 bp, Artificial Sequence
  Synthetic polynucleotide
ttcatgagcaaacatgccatatcgtcgctagggagtgtaacttagtctacggccc

SEQ ID NO: 2769 - DNA, 55 bp, Artificial Sequence
  Synthetic polynucleotide
cgtagcgacagcactactttgcgacaaccttggtaggtatctggtagggttatag

SEQ ID NO: 2770 - DNA, 55 bp, Artificial Sequence
  Synthetic polynucleotide
gtctcgcctgagtccgcattatacttgatgggggcggtgagatgagggatttacc

SEQ ID NO: 2771 - DNA, 55 bp, Artificial Sequence
  Synthetic polynucleotide
gctctaaaatcacccacagcttattgacggtggataaccgccccggcgccagcag

SEQ ID NO: 2772 - DNA, 55 bp, Artificial Sequence
  Synthetic polynucleotide
gcagttgcccatgcagcgagcattcttgggtggacttacagtatgcttgaccata

SEQ ID NO: 2773 - DNA, 55 bp, Artificial Sequence
  Synthetic polynucleotide
ggagtacgaatcttaaccttactcaagagagggggtcggcgagctctgtttcagg

SEQ ID NO: 2774 - DNA, 55 bp, Artificial Sequence
  Synthetic polynucleotide
cctgagcatcaacgtgcaacccccctttctagggggacttgtatgcggccacggg

SEQ ID NO: 2775 - DNA, 55 bp, Artificial Sequence
  Synthetic polynucleotide
cttagcctgcacctctcacccgtcttgtttcgggagacgcgaggcaggccctcct

SEQ ID NO: 2776 - DNA, 55 bp, Artificial Sequence
  Synthetic polynucleotide
agcgtagcacccccctcgtcctaagatttcgggcaacggcgcgcatacacacacg

SEQ ID NO: 2777 - DNA, 55 bp, Artificial Sequence
  Synthetic polynucleotide
gatccgccggtgcgagccttcgtatcctatgggaacttgaggttcagcggggctc

SEQ ID NO: 2778 - DNA, 55 bp, Artificial Sequence
  Synthetic polynucleotide
gcgtaaaaggcgggctcattgggaacttccaggtaccacccggttcccgccggct

SEQ ID NO: 2779 - DNA, 55 bp, Artificial Sequence
  Synthetic polynucleotide
cagtcagatcccgcgccgagccatccatctggggtctgggatcggctagagtcac

SEQ ID NO: 2780 - DNA, 55 bp, Artificial Sequence
  Synthetic polynucleotide
ggtgcccccttcacatcaatacattgctctgggggcgtggctcccggtgcaaggc

SEQ ID NO: 2781 - DNA, 55 bp, Artificial Sequence
  Synthetic polynucleotide
gcgtactccatcgacgcctcactctttgtcagggtccgggtataggacgccgctg

SEQ ID NO: 2782 - DNA, 55 bp, Artificial Sequence
  Synthetic polynucleotide
gaggttcccccagcgccggtccaagtctgaaggatcctgactagctagcgcccaa

SEQ ID NO: 2783 - DNA, 55 bp, Artificial Sequence
  Synthetic polynucleotide
agcctgctttaacgtccagcatatcccgtcgggtatagggggcgtccacggtgcc

SEQ ID NO: 2784 - DNA, 55 bp, Artificial Sequence
  Synthetic polynucleotide
cgcccctcacatgcaccagatgaattcatggggggggcgtcactgcaccacggtt

SEQ ID NO: 2785 - DNA, 55 bp, Artificial Sequence
  Synthetic polynucleotide
ttttccgtgcaaccaacacagcacatgcgttggggcgtcctcgggagccgcgcga

SEQ ID NO: 2786 - DNA, 55 bp, Artificial Sequence
  Synthetic polynucleotide
ttccccgacgaaatgccactaccacacagtgggccaggcttgaggacgagcctcg

SEQ ID NO: 2787 - DNA, 55 bp, Artificial Sequence
  Synthetic polynucleotide
gtacgcctacccgttccccacgtacacagcgggaagtctagatgctcccgatgcc

SEQ ID NO: 2788 - DNA, 55 bp, Artificial Sequence
  Synthetic polynucleotide
cgcgacccccattaccctcattactaccgctggtaggcagccggatgcttgctcg

SEQ ID NO: 2789 - DNA, 55 bp, Artificial Sequence
  Synthetic polynucleotide
ttaattctacagtattcattcattctttaagggtttttggttatcctgggtcaca

SEQ ID NO: 2790 - DNA, 55 bp, Artificial Sequence
  Synthetic polynucleotide
tagatcctacgccatccttcttatattaactggaaaacttgtttcaaatatagta

SEQ ID NO: 2791 - DNA, 55 bp, Artificial Sequence
  Synthetic polynucleotide
gctaaggtttaaacttctaccgagtaaatttggaaattctattggtcttcgtata

SEQ ID NO: 2792 - DNA, 55 bp, Artificial Sequence
  Synthetic polynucleotide
tagcatttgctctatgcatagaataaaacttggagagcaactttcgatagaataa

SEQ ID NO: 2793 - DNA, 55 bp, Artificial Sequence
  Synthetic polynucleotide
tgatttttttggtaacctatgatataatactggctcttgtaagtgtttaatcttt

SEQ ID NO: 2794 - DNA, 55 bp, Artificial Sequence
  Synthetic polynucleotide
gttccgactcgttgatctaatactaaaatcagggtcaatatattttccagatttt

SEQ ID NO: 2795 - DNA, 55 bp, Artificial Sequence
  Synthetic polynucleotide
atagggtaagctatgccattaaaaaaattccggactactttacaaaattgacttt

SEQ ID NO: 2796 - DNA, 55 bp, Artificial Sequence
  Synthetic polynucleotide
agaataataaacagaacgtgtttacgatctgggtcactagtaatgaaagaatagt

SEQ ID NO: 2797 - DNA, 55 bp, Artificial Sequence
  Synthetic polynucleotide
acatctaactattaagcattattgctgttcaggtacagaattatttggttaacat

SEQ ID NO: 2798 - DNA, 55 bp, Artificial Sequence
  Synthetic polynucleotide
agtaactgaggttatgcacaataaaatagttggcacttctatgtcaccataatta

SEQ ID NO: 2799 - DNA, 55 bp, Artificial Sequence
  Synthetic polynucleotide
gttatcattaaggtatctatgtatataagggggaataattgtaattcgagaaccg

SEQ ID NO: 2800 - DNA, 55 bp, Artificial Sequence
  Synthetic polynucleotide
tatattgtgagctcatccgtaatttaaaggaggtatagtgaattttgtgattcat

SEQ ID NO: 2801 - DNA, 55 bp, Artificial Sequence
  Synthetic polynucleotide
ttcttgtagaatcacactacagtataacgaggggtgcatatatttttatcttagt

SEQ ID NO: 2802 - DNA, 55 bp, Artificial Sequence
  Synthetic polynucleotide
gactttgttatagaatctaagtattcacactggagaaatgtaagttttgcgaagt

SEQ ID NO: 2803 - DNA, 55 bp, Artificial Sequence
  Synthetic polynucleotide
gcaagatggagaaatccagtaagataacggtgggttttcgaaattttataaaaaa

SEQ ID NO: 2804 - DNA, 55 bp, Artificial Sequence
  Synthetic polynucleotide
agaaccaaacaatgttcatgcttcatatttgggtggagaacactgcctataaatt

SEQ ID NO: 2805 - DNA, 55 bp, Artificial Sequence
  Synthetic polynucleotide
tagcttgaacacagcgcaagccactaattttggattagtaccatatccaccattt

SEQ ID NO: 2806 - DNA, 55 bp, Artificial Sequence
  Synthetic polynucleotide
ctatctccaaattgaccggttctctaatttaggtcggcttcattagaaggtttta

SEQ ID NO: 2807 - DNA, 55 bp, Artificial Sequence
  Synthetic polynucleotide
aattgagcaaacctgtcgcagacctataaatggaaatcgcttgtagcaaatatgg

SEQ ID NO: 2808 - DNA, 55 bp, Artificial Sequence
  Synthetic polynucleotide
taaagtgtcttttctcccaaatacttataatggggcaccgctctgaaaaaaaatt

SEQ ID NO: 2809 - DNA, 55 bp, Artificial Sequence
  Synthetic polynucleotide
agcagactgttataggcaagatccctttacgggaattactgaatacatccaattg

SEQ ID NO: 2810 - DNA, 55 bp, Artificial Sequence
  Synthetic polynucleotide
acgagcaaatttggtcctagcttacaatcgaggatggaatttagaatcgattaac

SEQ ID NO: 2811 - DNA, 55 bp, Artificial Sequence
  Synthetic polynucleotide
ctagcttagaaagaaaccagaccctttatggggaaaactatgctagacagtatca

SEQ ID NO: 2812 - DNA, 55 bp, Artificial Sequence
  Synthetic polynucleotide
aattgtccgaaaccaactaaatacttcatatggaataggctccccccaataactt

SEQ ID NO: 2813 - DNA, 55 bp, Artificial Sequence
  Synthetic polynucleotide
tttgatattccagtctcgagagaaccaatatgggaattagcttagttgcgtagag

SEQ ID NO: 2814 - DNA, 55 bp, Artificial Sequence
  Synthetic polynucleotide
gaaatttgagatagaacccctgatgctaatcggttggcatttcaatcgtattcct

SEQ ID NO: 2815 - DNA, 55 bp, Artificial Sequence
  Synthetic polynucleotide
gaggtcataagtctgccacataaatacactaggttctgattcccaatgactcttt

SEQ ID NO: 2816 - DNA, 55 bp, Artificial Sequence
  Synthetic polynucleotide
tttggtgtagtggatccattaattctccgtggggcagatatatatgtatatacag

SEQ ID NO: 2817 - DNA, 55 bp, Artificial Sequence
  Synthetic polynucleotide
actatacattaaaccacaagtgaccaacttcggctacatggcgaacattgttaca

SEQ ID NO: 2818 - DNA, 55 bp, Artificial Sequence
  Synthetic polynucleotide
ttacatgaccaacagccaaatttacacataaggagcttcatctataatcggccta

SEQ ID NO: 2819 - DNA, 55 bp, Artificial Sequence
  Synthetic polynucleotide
caaagcgctgttaaggcacttgcctaaattagggttgaatcgttagaatctgtag

SEQ ID NO: 2820 - DNA, 55 bp, Artificial Sequence
  Synthetic polynucleotide
tttctgtttcggaagacatcttaataattgagggtgagaggcaaccaaccaaggt

SEQ ID NO: 2821 - DNA, 55 bp, Artificial Sequence
  Synthetic polynucleotide
ttattataactgtgcccggtttcgtatattaggcaggagtacttgctgaaacagg

SEQ ID NO: 2822 - DNA, 55 bp, Artificial Sequence
  Synthetic polynucleotide
cctgagttattttgaccagctcgcttaatgggggaatagtttgcctgatttgtgg

SEQ ID NO: 2823 - DNA, 55 bp, Artificial Sequence
  Synthetic polynucleotide
cttaaccactggtgtacgacgaaaatttagtgggacagcaggatttcaacccaag

SEQ ID NO: 2824 - DNA, 55 bp, Artificial Sequence
  Synthetic polynucleotide
ctttcgtaagggtaacctcaaatctatttgggggagatagcctgaaactgtccag

SEQ ID NO: 2825 - DNA, 55 bp, Artificial Sequence
  Synthetic polynucleotide
aattctagtcgcattcctatttagaagcaacggcggatttctttcttggtggcat

SEQ ID NO: 2826 - DNA, 55 bp, Artificial Sequence
  Synthetic polynucleotide
cgcaatttcataggtgcctgaactatagtttggcgggttgtagttgtaaaccggt

SEQ ID NO: 2827 - DNA, 55 bp, Artificial Sequence
  Synthetic polynucleotide
gcaagacaatttctctcatcccgcttggtaaggacaaaccccagaattatcggaa

SEQ ID NO: 2828 - DNA, 55 bp, Artificial Sequence
  Synthetic polynucleotide
atatttgcatgctgaccgattgtatatagaaggcatggactagcgctgactccct

SEQ ID NO: 2829 - DNA, 55 bp, Artificial Sequence
  Synthetic polynucleotide
ctcctagtcgtaaatcctcagaaatatggctgggttaaaagtccctaatatggcg

SEQ ID NO: 2830 - DNA, 55 bp, Artificial Sequence
  Synthetic polynucleotide
agagatcaatactaacctcctaaacgacagggggtaaagctgagtctctatggtc

SEQ ID NO: 2831 - DNA, 55 bp, Artificial Sequence
  Synthetic polynucleotide
ataccgtggattaagtctacaagcacacggaggtctgttgatcgttggtatatat

SEQ ID NO: 2832 - DNA, 55 bp, Artificial Sequence
  Synthetic polynucleotide
tacaatgacgctgcgacatgtgtatgtcaaagggtttattgggcgatctgttatt

SEQ ID NO: 2833 - DNA, 55 bp, Artificial Sequence
  Synthetic polynucleotide
ttcaatcgaagtatagctatcttgctacggggggattgaagagaagaagaggagc

SEQ ID NO: 2834 - DNA, 55 bp, Artificial Sequence
  Synthetic polynucleotide
cgatcctcccccgcttcgatctgatattaacggggcctaggtcaaaagggaattc

SEQ ID NO: 2835 - DNA, 55 bp, Artificial Sequence
  Synthetic polynucleotide
cgcatatgttccaagcctgttatctattacaggtgctcaagtgaccgccccggat

SEQ ID NO: 2836 - DNA, 55 bp, Artificial Sequence
  Synthetic polynucleotide
ttaattgagattctacctttcagctaattgggggtattccgcactggcaccctcg

SEQ ID NO: 2837 - DNA, 55 bp, Artificial Sequence
  Synthetic polynucleotide
gatccgggtcaggccactcaagacaatttgcggtatcctacgttggtttttcgca

SEQ ID NO: 2838 - DNA, 55 bp, Artificial Sequence
  Synthetic polynucleotide
ccggtttaaattcgaccgttgcacacaaaatggggagagacaaatgccccagttt

SEQ ID NO: 2839 - DNA, 55 bp, Artificial Sequence
  Synthetic polynucleotide
cagggagcaaaaacgacccgcctcatttacaggtgaacaggcagtacgttcccgc

SEQ ID NO: 2840 - DNA, 55 bp, Artificial Sequence
  Synthetic polynucleotide
gttcagacactagaatcccgtcctttagcatgggtgtgtagcccatgcgtcttct

SEQ ID NO: 2841 - DNA, 55 bp, Artificial Sequence
  Synthetic polynucleotide
gttacttcgaccgcggccctttcccccttatgggttcacttcgcagacaaatcaa

SEQ ID NO: 2842 - DNA, 55 bp, Artificial Sequence
  Synthetic polynucleotide
catgcgaggtcccatcccgtgatgatcctaagggcgaaaggtgcgccactataaa

SEQ ID NO: 2843 - DNA, 55 bp, Artificial Sequence
  Synthetic polynucleotide
agcatcgacctccgttcgagaaataccctctggcttgggcagggacggaatcgcg

SEQ ID NO: 2844 - DNA, 55 bp, Artificial Sequence
  Synthetic polynucleotide
acatcgggggaccattcactaaacctcgtaaggaaggatctgtgggtcactgcgt

SEQ ID NO: 2845 - DNA, 55 bp, Artificial Sequence
  Synthetic polynucleotide
tggccgtctccagtaccctgaaaaatctggcggctactgggttgggctacccaga

SEQ ID NO: 2846 - DNA, 55 bp, Artificial Sequence
  Synthetic polynucleotide
cctggagaatccggcgcatcacataactgagggtgtttccatgcatttactgaag

SEQ ID NO: 2847 - DNA, 55 bp, Artificial Sequence
  Synthetic polynucleotide
cgtggatattaacctccctgtgataccggcagggtaatgctcagaggtttgatat

SEQ ID NO: 2848 - DNA, 55 bp, Artificial Sequence
  Synthetic polynucleotide
gtcggggctcaacgccctaccgtacagagatggatataggcttaggtcaagtgtt

SEQ ID NO: 2849 - DNA, 55 bp, Artificial Sequence
  Synthetic polynucleotide
gactcctttcgcccatccgctccctcgtttggggacacacgggctatgtggactg

SEQ ID NO: 2850 - DNA, 55 bp, Artificial Sequence
  Synthetic polynucleotide
ggcgagccggccctaccgcaccgactttcaggggtgtagtggctcctgcactgag

SEQ ID NO: 2851 - DNA, 55 bp, Artificial Sequence
  Synthetic polynucleotide
acgaccgccctctctccacccgcagtcttttgggggcgctcgttatgcggccaac

SEQ ID NO: 2852 - DNA, 55 bp, Artificial Sequence
  Synthetic polynucleotide
cctcacgtacgacagtcaccgcaaaaatagggggcggcgcgtgaactggcagcca

SEQ ID NO: 2853 - DNA, 55 bp, Artificial Sequence
  Synthetic polynucleotide
gtcacccccgacagccctcgaagtgaatttggggtctcgatgccactccacacgg

SEQ ID NO: 2854 - DNA, 55 bp, Artificial Sequence
  Synthetic polynucleotide
ggcggcaccggaccgcctcaagcctttaaatggcatggacaccgcacgtcgggta

SEQ ID NO: 2855 - DNA, 55 bp, Artificial Sequence
  Synthetic polynucleotide
caagcgagagctcagccgagtagtcactaatggaaaaagcgcggcggcgctccgg

SEQ ID NO: 2856 - DNA, 55 bp, Artificial Sequence
  Synthetic polynucleotide
gtgcccaacggcccgtcccatccgccagtgaggtggtaaccgactttggtagtga

SEQ ID NO: 2857 - DNA, 55 bp, Artificial Sequence
  Synthetic polynucleotide
gccgggcgagctgatgctttgaaattaccgcggtgcgtccctagggccagaactc

SEQ ID NO: 2858 - DNA, 55 bp, Artificial Sequence
  Synthetic polynucleotide
ccgcgcctatggcgagctcgagacgagaaatggttactcaacccataccccgccc

SEQ ID NO: 2859 - DNA, 55 bp, Artificial Sequence
  Synthetic polynucleotide
cacgcggactaactacccacgacccccctaaggtggaacgctttgctgcactccg

SEQ ID NO: 2860 - DNA, 55 bp, Artificial Sequence
  Synthetic polynucleotide
gtcaacgggccccagacctaacacttaggcgggagcggagagctggctatctggt

SEQ ID NO: 2861 - DNA, 55 bp, Artificial Sequence
  Synthetic polynucleotide
aatcccactgcgtccacagtagaaacaggggggcgggacgttccgtgagtcgcct

SEQ ID NO: 2862 - DNA, 55 bp, Artificial Sequence
  Synthetic polynucleotide
ggcggttggagtcctgcgatacaccactggggggatgtggtcgactgacgcagac

SEQ ID NO: 2863 - DNA, 55 bp, Artificial Sequence
  Synthetic polynucleotide
gagggcgacagccctgctcagaattacggtgggtaagagttccccccgtcgcgca

SEQ ID NO: 2864 - DNA, 55 bp, Artificial Sequence
  Synthetic polynucleotide
tcttgaactaatagctctatttgtctttcttggtagttaacagactaaatgaaat

SEQ ID NO: 2865 - DNA, 55 bp, Artificial Sequence
  Synthetic polynucleotide
gacgctaaaattaaatctattacttagttagggtcacctagatttttgatcaagg

SEQ ID NO: 2866 - DNA, 55 bp, Artificial Sequence
  Synthetic polynucleotide
tgggactaactttatactttaggcattaaacggcatctaatgatttatttagtag

SEQ ID NO: 2867 - DNA, 55 bp, Artificial Sequence
  Synthetic polynucleotide
gtataaaaaccttagacgtgtggacattactggacttgtttactttatgattaac

SEQ ID NO: 2868 - DNA, 55 bp, Artificial Sequence
  Synthetic polynucleotide
tgtaatctcgatttagccgtactttagtttaggttctatcgcattaaataaaaga

SEQ ID NO: 2869 - DNA, 55 bp, Artificial Sequence
  Synthetic polynucleotide
aattggcctttctctacacgaaattggtttgggttatatataattattagcaatc

SEQ ID NO: 2870 - DNA, 55 bp, Artificial Sequence
  Synthetic polynucleotide
catctctgcttggtgtcaatgaaatagaataggtcacatacaaatttgaacaatt

SEQ ID NO: 2871 - DNA, 55 bp, Artificial Sequence
  Synthetic polynucleotide
atctttacagccaatactcgggtttaagtttggtttatgcgaattttaacatact

SEQ ID NO: 2872 - DNA, 55 bp, Artificial Sequence
  Synthetic polynucleotide
taactgtccgtatttcccttcatatctatctggataatgtttatctataccgaaa

SEQ ID NO: 2873 - DNA, 55 bp, Artificial Sequence
  Synthetic polynucleotide
ttttctaaatgatatgcgaagaagaatagaaggtattgtttcgtgcgtgaagttt

SEQ ID NO: 2874 - DNA, 55 bp, Artificial Sequence
  Synthetic polynucleotide
gaaattcacataaacacaactcaccgtccgtggcaatttatgtgtttaaaataaa

SEQ ID NO: 2875 - DNA, 55 bp, Artificial Sequence
  Synthetic polynucleotide
gaaagaataaaaaaaccacaggaagttgacaggtagactagaaatctataatgat

SEQ ID NO: 2876 - DNA, 55 bp, Artificial Sequence
  Synthetic polynucleotide
tacattgaaatatcaacataaccagaacagaggcaattttcacttacaataagtc

SEQ ID NO: 2877 - DNA, 55 bp, Artificial Sequence
  Synthetic polynucleotide
tatgtattgagacgtgcattggaaaaccattggagattgcttttgttattatgat

SEQ ID NO: 2878 - DNA, 55 bp, Artificial Sequence
  Synthetic polynucleotide
tcacatgattacttacctaaagagaacgaacggatatgtcttttaacaattgtat

SEQ ID NO: 2879 - DNA, 55 bp, Artificial Sequence
  Synthetic polynucleotide
gatagtgagcttaaatcacctggagtttcatggagaaaccctttgccgtttatta

SEQ ID NO: 2880 - DNA, 55 bp, Artificial Sequence
  Synthetic polynucleotide
ggtacagtgcgtaattcaagtggctaaaaagggctaagttttcaaatcactacaa

SEQ ID NO: 2881 - DNA, 55 bp, Artificial Sequence
  Synthetic polynucleotide
tactgttaatcccagtccaattggataattgggtcgtttgaaacaaattggcgtg

SEQ ID NO: 2882 - DNA, 55 bp, Artificial Sequence
  Synthetic polynucleotide
atacaggttttaaaaacgttatgatagtttaggataggtgccccagtaagcgtcc

SEQ ID NO: 2883 - DNA, 55 bp, Artificial Sequence
  Synthetic polynucleotide
atcttcaaaaacctcccctgtcggcttaattggctaaccattcttttctataaag

SEQ ID NO: 2884 - DNA, 55 bp, Artificial Sequence
  Synthetic polynucleotide
tcctcaaatctacgcccataacgaatataacggatagacaatgttgcacctacat

SEQ ID NO: 2885 - DNA, 55 bp, Artificial Sequence
  Synthetic polynucleotide
aaaaacttatagttcacgtaactggagatttggagcgtggaaaccatctctccaa

SEQ ID NO: 2886 - DNA, 55 bp, Artificial Sequence
  Synthetic polynucleotide
aagaccaactaaagatccgggataggagttaggatgttgcataatttcatagtta

SEQ ID NO: 2887 - DNA, 55 bp, Artificial Sequence
  Synthetic polynucleotide
gtcaaagtccattattcgaaatccaatccaaggtcactggaatttgttgattaag

SEQ ID NO: 2888 - DNA, 55 bp, Artificial Sequence
  Synthetic polynucleotide
cgtaccctaacggtttcaaattgactgcactggtcttgctaaatgttaaatgatc

SEQ ID NO: 2889 - DNA, 55 bp, Artificial Sequence
  Synthetic polynucleotide
taacaaagacatttaccaaaactcggtatccggtggaggcattctcctagttttt

SEQ ID NO: 2890 - DNA, 55 bp, Artificial Sequence
  Synthetic polynucleotide
tttcaaactcggaagtcctacggtcaacagtggtcaatacgttcatttagttctt

SEQ ID NO: 2891 - DNA, 55 bp, Artificial Sequence
  Synthetic polynucleotide
ttgaattcattaggaacaagaatacggaacgggcttattttatacaagatcgatc

SEQ ID NO: 2892 - DNA, 55 bp, Artificial Sequence
  Synthetic polynucleotide
ggtaatttaagaatgtctactgtaccaggctggaccaaataacatcaggatatcg

SEQ ID NO: 2893 - DNA, 55 bp, Artificial Sequence
  Synthetic polynucleotide
tttttttatgagttcacgaggataaaaccgagggggtgatcctgcttctcaattt

SEQ ID NO: 2894 - DNA, 55 bp, Artificial Sequence
  Synthetic polynucleotide
catggcggttagttgtctgcaagctaaatttggagctaatacacctccataggaa

SEQ ID NO: 2895 - DNA, 55 bp, Artificial Sequence
  Synthetic polynucleotide
tccggattgtcattccccttcggttatttgcggttaaggtttggcaataaataga

SEQ ID NO: 2896 - DNA, 55 bp, Artificial Sequence
  Synthetic polynucleotide
tagctaaaggaatttgcccctaggctttctagggaaagtgtctactaagtcactt

SEQ ID NO: 2897 - DNA, 55 bp, Artificial Sequence
  Synthetic polynucleotide
ctcgattacgtgactcctcttacggtaaaacggtaggtttaaggctccgtatcat

SEQ ID NO: 2898 - DNA, 55 bp, Artificial Sequence
  Synthetic polynucleotide
ctcaaagatgtccgagcaagtcggtttacacggttgttccaaccatagttacttg

SEQ ID NO: 2899 - DNA, 55 bp, Artificial Sequence
  Synthetic polynucleotide
gagcacgctgattagtcgcctaaggatttaaggtgtagatagttaacactatcac

SEQ ID NO: 2900 - DNA, 55 bp, Artificial Sequence
  Synthetic polynucleotide
atctatttgggtcccactcctacgattgattggatcgattgcggctggaattaat

SEQ ID NO: 2901 - DNA, 55 bp, Artificial Sequence
  Synthetic polynucleotide
cttaaaaattgagctccttcattaaggtaaaggcaggccgttatccgctcggtaa

SEQ ID NO: 2902 - DNA, 55 bp, Artificial Sequence
  Synthetic polynucleotide
aaaatgcgtcactgtactgataatggtaaatggacgatgctctactctggcagat

SEQ ID NO: 2903 - DNA, 55 bp, Artificial Sequence
  Synthetic polynucleotide
gtttcaaaaaattgatccttcaagagagagaggcgatgcccggctctttgtctgt

SEQ ID NO: 2904 - DNA, 55 bp, Artificial Sequence
  Synthetic polynucleotide
cacgtactggaagtccccatgtatgttgtatggctatatgcaccacacattgaag

SEQ ID NO: 2905 - DNA, 55 bp, Artificial Sequence
  Synthetic polynucleotide
gccattaacatagcatccatggttgtcgtcaggaagccacaattagcatcactca

SEQ ID NO: 2906 - DNA, 55 bp, Artificial Sequence
  Synthetic polynucleotide
ttttagaaggatactcccatagagcatagcaggcgaagtgtagtggaatatggtc

SEQ ID NO: 2907 - DNA, 55 bp, Artificial Sequence
  Synthetic polynucleotide
tcacatatctcttaaccaaagaatgacgactggaaggcagccgcagatatccagt

SEQ ID NO: 2908 - DNA, 55 bp, Artificial Sequence
  Synthetic polynucleotide
tttctcaaatgagaaacgtacgaacaagtacggaatatggagcgcaacgcgatgc

SEQ ID NO: 2909 - DNA, 55 bp, Artificial Sequence
  Synthetic polynucleotide
gcggccttagtctttacgtagcgggtttatagggtgttgcctagaattgtaagcg

SEQ ID NO: 2910 - DNA, 55 bp, Artificial Sequence
  Synthetic polynucleotide
tattatgctccgctgccaccacggctttattgggcttcagaactaaccgatgcag

SEQ ID NO: 2911 - DNA, 55 bp, Artificial Sequence
  Synthetic polynucleotide
cgtagaaaatccactccgtgtggactttaccggttggactaggatgcccccagaa

SEQ ID NO: 2912 - DNA, 55 bp, Artificial Sequence
  Synthetic polynucleotide
gcctttgctgattgatcataccttggtgcttggcataagactcgtgtttgagagg

SEQ ID NO: 2913 - DNA, 55 bp, Artificial Sequence
  Synthetic polynucleotide
aatccttagcccttgccgcgctatgcgatgcggttttttcaaggggcattaatcg

SEQ ID NO: 2914 - DNA, 55 bp, Artificial Sequence
  Synthetic polynucleotide
agcagctatgcttagccattactgggtcctgggaaatcgtacacatgcacatcgc

SEQ ID NO: 2915 - DNA, 55 bp, Artificial Sequence
  Synthetic polynucleotide
accatactcgtatctccggatgcaagagcaaggggcagtgtctaatatcctctaa

SEQ ID NO: 2916 - DNA, 55 bp, Artificial Sequence
  Synthetic polynucleotide
taaccgcgcttaatacctcacgagataaaacgggagatagcttgatcggttccgt

SEQ ID NO: 2917 - DNA, 55 bp, Artificial Sequence
  Synthetic polynucleotide
aatgttggaatttcgtcgttctacggtccacggcactgtgcaaatccatgcgtgt

SEQ ID NO: 2918 - DNA, 55 bp, Artificial Sequence
  Synthetic polynucleotide
ggctgaagcaacatccccagttagtcagtcaggtcgcggctgctcacgcgcatag

SEQ ID NO: 2919 - DNA, 55 bp, Artificial Sequence
  Synthetic polynucleotide
cccgcgtataattaatccccgagccatcgagggataaggtattgacgcatgatca

SEQ ID NO: 2920 - DNA, 55 bp, Artificial Sequence
  Synthetic polynucleotide
gagcccgtatgctgtgcccatcctaggaggaggaagatacaactgctgtcggttc

SEQ ID NO: 2921 - DNA, 55 bp, Artificial Sequence
  Synthetic polynucleotide
ttaactctgtcacgatcctctgagcacagcaggtgctttgatgccagttttctcg

SEQ ID NO: 2922 - DNA, 55 bp, Artificial Sequence
  Synthetic polynucleotide
attgagttgccaatcccgatagacgaaagacggctggctagatcacttgggcagg

SEQ ID NO: 2923 - DNA, 55 bp, Artificial Sequence
  Synthetic polynucleotide
ttatccgaggaattaccggcttataaccggcggcaaacgggagagtgcccatacc

SEQ ID NO: 2924 - DNA, 55 bp, Artificial Sequence
  Synthetic polynucleotide
tcttatgctgcctgtgcacgcccagttgcacgggggggatccgtgatgggaacct

SEQ ID NO: 2925 - DNA, 55 bp, Artificial Sequence
  Synthetic polynucleotide
acgcgcactccatgaacttgtccgatttccgggtgcgcgcgtcgggccttggggg

SEQ ID NO: 2926 - DNA, 55 bp, Artificial Sequence
  Synthetic polynucleotide
cggcggctcccgttgccgccccggaatttgaggaattcatgcgatagcgcccaag

SEQ ID NO: 2927 - DNA, 55 bp, Artificial Sequence
  Synthetic polynucleotide
cgggagccctgccacgcgaagtcagctgcttggtgattggaccgggacgacccgc

SEQ ID NO: 2928 - DNA, 55 bp, Artificial Sequence
  Synthetic polynucleotide
cgaccccgccggttgacgccctaggtcactaggaagcacgtagcctaccgcgaat

SEQ ID NO: 2929 - DNA, 55 bp, Artificial Sequence
  Synthetic polynucleotide
accccggcctccacaccactggggaagtattgggaatctgtgctcaacgccggct

SEQ ID NO: 2930 - DNA, 55 bp, Artificial Sequence
  Synthetic polynucleotide
catcgaaccttctcgcccttgcgagttcgaggggtcagggacgaccaggcgtacc

SEQ ID NO: 2931 - DNA, 55 bp, Artificial Sequence
  Synthetic polynucleotide
gggctccggtcgagcgcgcaaccgctcctctggggaggatttaacggcagtgagg

SEQ ID NO: 2932 - DNA, 55 bp, Artificial Sequence
  Synthetic polynucleotide
gagtccctccagccaacccacagcgtaaagcggtatcttagggccggtggtgcca

SEQ ID NO: 2933 - DNA, 55 bp, Artificial Sequence
  Synthetic polynucleotide
gcggaagcgagtcctacctccagatgggaatggttacccgcgcacggcttggaca

SEQ ID NO: 2934 - DNA, 55 bp, Artificial Sequence
  Synthetic polynucleotide
gacgttcccctgcgcacttgtcagatccagagggactcgccgagcgcgacactcg

SEQ ID NO: 2935 - DNA, 55 bp, Artificial Sequence
  Synthetic polynucleotide
tatggcattgagagccctaggaacaccctagggtcatatcgcgcccccgacgggg

SEQ ID NO: 2936 - DNA, 55 bp, Artificial Sequence
  Synthetic polynucleotide
cagtcgggtgggctcacacacattccgtgccggtagtgcggttgagagcatggca

SEQ ID NO: 2937 - DNA, 55 bp, Artificial Sequence
  Synthetic polynucleotide
cctctcatccgtaacgccttaccgctgtgggggctgtattgcggtcgtacgccca

SEQ ID NO: 2938 - DNA, 55 bp, Artificial Sequence
  Synthetic polynucleotide
cgcgatgccccatcatcttctcgtccgggccgggaaaggaagctatgaggtggcc

SEQ ID NO: 2939 - DNA, 55 bp, Artificial Sequence
  Synthetic polynucleotide
tacgatttatatcaaccattaaactcttcttggctctaaactaaatagcagtacg

SEQ ID NO: 2940 - DNA, 55 bp, Artificial Sequence
  Synthetic polynucleotide
actatgcaactcttccctttgtgataaatgtggctgtattgatataatacattag

SEQ ID NO: 2941 - DNA, 55 bp, Artificial Sequence
  Synthetic polynucleotide
tgataacaaatcttaccatggcatttaatatggaatttcaaatttggcatgctat

SEQ ID NO: 2942 - DNA, 55 bp, Artificial Sequence
  Synthetic polynucleotide
tataggctaaaatttacaactatgggatattgggcatcgacttttattgtaagct

SEQ ID NO: 2943 - DNA, 55 bp, Artificial Sequence
  Synthetic polynucleotide
tcctctaaggatataccagatttggagattcggataaaaatttagattaatttac

SEQ ID NO: 2944 - DNA, 55 bp, Artificial Sequence
  Synthetic polynucleotide
ttgtaaaaatataatacgcggttatggttaagggcacgagtataattttaaaatg

SEQ ID NO: 2945 - DNA, 55 bp, Artificial Sequence
  Synthetic polynucleotide
tattatattacgctagcatcatatggataaaggatcgcaatgatgatacactgta

SEQ ID NO: 2946 - DNA, 55 bp, Artificial Sequence
  Synthetic polynucleotide
ttaaagcctattggttccaagatattacctagggggatattaacatgtatttaac

SEQ ID NO: 2947 - DNA, 55 bp, Artificial Sequence
  Synthetic polynucleotide
attaactcaataagtacctatattaggttcagggggtggatttcaagaaagtaaa

SEQ ID NO: 2948 - DNA, 55 bp, Artificial Sequence
  Synthetic polynucleotide
ccaacaaaagtatcgtcgaattagagcaagaggtttgtaataaattcacgaaata

SEQ ID NO: 2949 - DNA, 55 bp, Artificial Sequence
  Synthetic polynucleotide
gacaaatagaacgatacataggtatcaagttggtatagatccatttaattgtcta

SEQ ID NO: 2950 - DNA, 55 bp, Artificial Sequence
  Synthetic polynucleotide
tcctaaatcgagtgaactagatacttcattcggtttgtcatagataaatttcgaa

SEQ ID NO: 2951 - DNA, 55 bp, Artificial Sequence
  Synthetic polynucleotide
aatatcaaattatcaccggagttaaagtggaggatataaagcaaatgtgaattga

SEQ ID NO: 2952 - DNA, 55 bp, Artificial Sequence
  Synthetic polynucleotide
ttaaatttggatatggcaggatgcaccagcaggtcaacttaattattaattattg

SEQ ID NO: 2953 - DNA, 55 bp, Artificial Sequence
  Synthetic polynucleotide
tttattaatgtgactacttgtgaatcatgatggagaatcaatttagctctttgct

SEQ ID NO: 2954 - DNA, 55 bp, Artificial Sequence
  Synthetic polynucleotide
agtttttgaacatatgctcttgtgctttcttggacatgcgattaccatattctgc

SEQ ID NO: 2955 - DNA, 55 bp, Artificial Sequence
  Synthetic polynucleotide
gtatacatattcttccctggctatggttcttgggtttaactaaaccgaatctata

SEQ ID NO: 2956 - DNA, 55 bp, Artificial Sequence
  Synthetic polynucleotide
aaaggactttgatatacgtcttccatttcctgggtattccaggacagcaatataa

SEQ ID NO: 2957 - DNA, 55 bp, Artificial Sequence
  Synthetic polynucleotide
ctattagggataaaagctttcgatttatttcgggttttaggtcgtgactgtatgt

SEQ ID NO: 2958 - DNA, 55 bp, Artificial Sequence
  Synthetic polynucleotide
gttactgtctatggatccgtttaggtatataggagtaaattgtgacaaagcttaa

SEQ ID NO: 2959 - DNA, 55 bp, Artificial Sequence
  Synthetic polynucleotide
aaggatatacaaaagtctggtttgtcatcagggtattcaacagtctcgaactaca

SEQ ID NO: 2960 - DNA, 55 bp, Artificial Sequence
  Synthetic polynucleotide
cttacttcttacatgtcccagacgtataccaggtttgacgcatacatgaacttaa

SEQ ID NO: 2961 - DNA, 55 bp, Artificial Sequence
  Synthetic polynucleotide
atccgctttcaagcttcagctagagttagtaggaataaaaaaggcagcttctagt

SEQ ID NO: 2962 - DNA, 55 bp, Artificial Sequence
  Synthetic polynucleotide
aaatgaggctaatatacaatcagttagataggggtttggcaaagatgccaacgtc

SEQ ID NO: 2963 - DNA, 55 bp, Artificial Sequence
  Synthetic polynucleotide
agtctatacattcacgctaaaacagacctctggtagacacaaggagttaaatacg

SEQ ID NO: 2964 - DNA, 55 bp, Artificial Sequence
  Synthetic polynucleotide
atgtcacctattaggtcaacagctgtcctatggtcgttatatgaacaataagact

SEQ ID NO: 2965 - DNA, 55 bp, Artificial Sequence
  Synthetic polynucleotide
gccaaacttatcaaacccaaagattgttgtgggccctttttcagtaagtttctca

SEQ ID NO: 2966 - DNA, 55 bp, Artificial Sequence
  Synthetic polynucleotide
ctatgaccattatggcccgtatggcaaggctggtaatcagtcattttaacattaa

SEQ ID NO: 2967 - DNA, 55 bp, Artificial Sequence
  Synthetic polynucleotide
tatattcgatatccaacggtaactaaccacaggcggtaactttctatggatgatt

SEQ ID NO: 2968 - DNA, 55 bp, Artificial Sequence
  Synthetic polynucleotide
catattcgatgatcaccttcagagtgtcagtggagctgactataagaaaacaaac

SEQ ID NO: 2969 - DNA, 55 bp, Artificial Sequence
  Synthetic polynucleotide
aaaatgctattacaatcgccctactcttcttgggatagccgagtgcaaaactgtt

SEQ ID NO: 2970 - DNA, 55 bp, Artificial Sequence
  Synthetic polynucleotide
cgtggctcttacatcgcagcggtctaatttaggtcagggagagtttaaacaatac

SEQ ID NO: 2971 - DNA, 55 bp, Artificial Sequence
  Synthetic polynucleotide
tcaactctccttcgtgcacttaggtatttcaggtccgtcgcccaacttaattagt

SEQ ID NO: 2972 - DNA, 55 bp, Artificial Sequence
  Synthetic polynucleotide
tgcacttaccgtatctcgtagagatttaagaggtcgaggcgaaaactaagtcaga

SEQ ID NO: 2973 - DNA, 55 bp, Artificial Sequence
  Synthetic polynucleotide
cgtcttaaaaccgcctcaattacctggtcttggatatcacttgtactcgcaaacc

SEQ ID NO: 2974 - DNA, 55 bp, Artificial Sequence
  Synthetic polynucleotide
tctacgagatggacgcccgagtttggtttagggtacaatttactggttaaacgta

SEQ ID NO: 2975 - DNA, 55 bp, Artificial Sequence
  Synthetic polynucleotide
atcttacttaccttcgcttaacccggtgcctgggatcgatgacaataaactgtga

SEQ ID NO: 2976 - DNA, 55 bp, Artificial Sequence
  Synthetic polynucleotide
gtgttaagctgagttccttcagctctatcagggaaatatcgagttcacctaattc

SEQ ID NO: 2977 - DNA, 55 bp, Artificial Sequence
  Synthetic polynucleotide
ttatacgctttcatgccatgcgtaatcatccggcaatataggattatccgtccaa

SEQ ID NO: 2978 - DNA, 55 bp, Artificial Sequence
  Synthetic polynucleotide
attcagctttccgctgcaagataggaacgtcggaagattattactaatacgcacc

SEQ ID NO: 2979 - DNA, 55 bp, Artificial Sequence
  Synthetic polynucleotide
agaccgagagtcagagcgaacatagacgataggtaaacaaatcactagtctgagc

SEQ ID NO: 2980 - DNA, 55 bp, Artificial Sequence
  Synthetic polynucleotide
actgacatatggtcatcgtgatacacagcacggttagctaggtcgtatcgttaac

SEQ ID NO: 2981 - DNA, 55 bp, Artificial Sequence
  Synthetic polynucleotide
gcgaaacttagacccacattaccttacgtacggattcactagctatagtcacttt

SEQ ID NO: 2982 - DNA, 55 bp, Artificial Sequence
  Synthetic polynucleotide
agaaggcaaagaccaacggataacatgagatggtttttccatacgttaagtcggc

SEQ ID NO: 2983 - DNA, 55 bp, Artificial Sequence
  Synthetic polynucleotide
ctcaaccaattctccccaggaaagatcaggaggaattctgttggaacttagcatc

SEQ ID NO: 2984 - DNA, 55 bp, Artificial Sequence
  Synthetic polynucleotide
atgctaacaggtgcctccggcttattattatggcatcatcccgtttggttgtggt

SEQ ID NO: 2985 - DNA, 55 bp, Artificial Sequence
  Synthetic polynucleotide
acaagaaaaatcccagctccgtcttcttctaggtcgtgcggcaccaaaccggtat

SEQ ID NO: 2986 - DNA, 55 bp, Artificial Sequence
  Synthetic polynucleotide
aagtaacacgtctcatctccgtggctttaacgggcctacatcagcggtaagtcac

SEQ ID NO: 2987 - DNA, 55 bp, Artificial Sequence
  Synthetic polynucleotide
ggagtgaagaactcatcatccggttaaacggggcgggccttctttgcttggataa

SEQ ID NO: 2988 - DNA, 55 bp, Artificial Sequence
  Synthetic polynucleotide
gcagtaactcggtctccagttgtcttacttcggcccatgcatttgcccagaacga

SEQ ID NO: 2989 - DNA, 55 bp, Artificial Sequence
  Synthetic polynucleotide
atgcgtcggttaggaccgcccagactatctaggggttgtccggcatggaatgccc

SEQ ID NO: 2990 - DNA, 55 bp, Artificial Sequence
  Synthetic polynucleotide
atgtctctcggtcatgcgcattggaactatgggagctcggactatgttgcaagtg

SEQ ID NO: 2991 - DNA, 55 bp, Artificial Sequence
  Synthetic polynucleotide
ggtgggcactgacatccaaagtttgcgtccgggaattatgactcattccggatgt

SEQ ID NO: 2992 - DNA, 55 bp, Artificial Sequence
  Synthetic polynucleotide
aacacacggtcctggccctccggagatgtatggagcacaattggtatattgacgt

SEQ ID NO: 2993 - DNA, 55 bp, Artificial Sequence
  Synthetic polynucleotide
tgggccgtggagaccgccgttaagtgccatgggaagtggatatcctgacatacat

SEQ ID NO: 2994 - DNA, 55 bp, Artificial Sequence
  Synthetic polynucleotide
ggcccaagtcttgcgccctaatacgaccctaggaggataggggcagtggtgtggt

SEQ ID NO: 2995 - DNA, 55 bp, Artificial Sequence
  Synthetic polynucleotide
ccgactcggccatctccgcctccatggagctggagtgaagtcaagattaggtata

SEQ ID NO: 2996 - DNA, 55 bp, Artificial Sequence
  Synthetic polynucleotide
gattacatgatcctaccatctaagcgatggtggcggatcctacattgctgtatcc

SEQ ID NO: 2997 - DNA, 55 bp, Artificial Sequence
  Synthetic polynucleotide
gcagatacattaagcacctatcgaccccgagggaactacgcagctaatccacgaa

SEQ ID NO: 2998 - DNA, 55 bp, Artificial Sequence
  Synthetic polynucleotide
aactctatacgaatcgctgatctgcaacactggtaggcggggtgaacacataaac

SEQ ID NO: 2999 - DNA, 55 bp, Artificial Sequence
  Synthetic polynucleotide
gagggtcggtctatagcacccgggaattcagggtaaagtgctatgggccgggggc

SEQ ID NO: 3000 - DNA, 55 bp, Artificial Sequence
  Synthetic polynucleotide
tcccagctcagcttccccgtctgctgatctgggatgaatgtagcggcggtacgcc

SEQ ID NO: 3001 - DNA, 55 bp, Artificial Sequence
  Synthetic polynucleotide
cggcggctccgcggtccgactcttagttctaggagaaatacccacccgtggagca

SEQ ID NO: 3002 - DNA, 55 bp, Artificial Sequence
  Synthetic polynucleotide
tgtgctccccctatcgcaccctgttgaatgagggctgacggcgtcatcaggcccg

SEQ ID NO: 3003 - DNA, 55 bp, Artificial Sequence
  Synthetic polynucleotide
acttgcgactttagtcccccagggctttagaggcggtgaacgacgcgccggggac

SEQ ID NO: 3004 - DNA, 55 bp, Artificial Sequence
  Synthetic polynucleotide
gtacgtcgacggcgcccggacgagtcttactggtcaccagcatccggggggactg

SEQ ID NO: 3005 - DNA, 55 bp, Artificial Sequence
  Synthetic polynucleotide
gaccttgcccgcacccctcatcgctgctgcgggattcaatagagccacgggggag

SEQ ID NO: 3006 - DNA, 55 bp, Artificial Sequence
  Synthetic polynucleotide
atcgctgagcgtgtcgccggtctacattacaggcttccccctgggctcgtagcgc

SEQ ID NO: 3007 - DNA, 55 bp, Artificial Sequence
  Synthetic polynucleotide
cgtgcttccaggttgaccgcaatgccaaatgggtggggcgagtctcgcgccggat

SEQ ID NO: 3008 - DNA, 55 bp, Artificial Sequence
  Synthetic polynucleotide
gcgctggacgatcggccttccaaagacgaaaggccagtcgcgaagggttggccct

SEQ ID NO: 3009 - DNA, 55 bp, Artificial Sequence
  Synthetic polynucleotide
cgaaccagtccaacgtctcttaccatgcgcggggcatgccgggtctgccggaagc

SEQ ID NO: 3010 - DNA, 55 bp, Artificial Sequence
  Synthetic polynucleotide
acaggcgggttttgcacggtacaatggcataggctttcacttgcgcccggcgccc

SEQ ID NO: 3011 - DNA, 55 bp, Artificial Sequence
  Synthetic polynucleotide
gagaggacccattgctcgagaactgacatctggtggtccccgagctcccgtgccc

SEQ ID NO: 3012 - DNA, 55 bp, Artificial Sequence
  Synthetic polynucleotide
gtgggacccgccttctccccaacggacgtacggggagtgggtgtaatgagatccg

SEQ ID NO: 3013 - DNA, 55 bp, Artificial Sequence
  Synthetic polynucleotide
gccacacacggttccacctatcagacacagggggcgcataagcgatacgtgcggg

SEQ ID NO: 3014 - DNA, 55 bp, Artificial Sequence
  Synthetic polynucleotide
tatattacacactaaaccgttattgtttcgtggctttgtcaatgtgaaatttcaa

SEQ ID NO: 3015 - DNA, 55 bp, Artificial Sequence
  Synthetic polynucleotide
attgttctataattgtctttaatctattattggtaaatgacataacaactacgac

SEQ ID NO: 3016 - DNA, 55 bp, Artificial Sequence
  Synthetic polynucleotide
aaattagaacgcttggcgatgattaattatgggattattgtccatacttgaaaga

SEQ ID NO: 3017 - DNA, 55 bp, Artificial Sequence
  Synthetic polynucleotide
catcttactgagaaatcagttcacttaatctggactttaatatcgagtctaaatt

SEQ ID NO: 3018 - DNA, 55 bp, Artificial Sequence
  Synthetic polynucleotide
ttccttcagcaactttcataatccttatcttggagatctgtgcttaaataacata

SEQ ID NO: 3019 - DNA, 55 bp, Artificial Sequence
  Synthetic polynucleotide
attttcaaagaaatcgcatggcataaatatgggtcatcatctcatctcataatgt

SEQ ID NO: 3020 - DNA, 55 bp, Artificial Sequence
  Synthetic polynucleotide
aatttgtagataatagcaatgtatgaaaaatggtttcatatcggatagttaagtt

SEQ ID NO: 3021 - DNA, 55 bp, Artificial Sequence
  Synthetic polynucleotide
tgtattctagttataccttaaaaagtctcaaggtgaaaagaagatctcacactca

SEQ ID NO: 3022 - DNA, 55 bp, Artificial Sequence
  Synthetic polynucleotide
ttggcttgatcactatcaacaatgattaattggaacatgtagacacgtcaaattt

SEQ ID NO: 3023 - DNA, 55 bp, Artificial Sequence
  Synthetic polynucleotide
tttgttaccaattacacctgattgatttgttggtcgttttcagatgtatagtcta

SEQ ID NO: 3024 - DNA, 55 bp, Artificial Sequence
  Synthetic polynucleotide
aaaatttgttacacctcgaatgaatcgaattggaatagtgatagacctatttctc

SEQ ID NO: 3025 - DNA, 55 bp, Artificial Sequence
  Synthetic polynucleotide
ggtaactattttattgcggatattgatagaagggattgagatctttaccaattac

SEQ ID NO: 3026 - DNA, 55 bp, Artificial Sequence
  Synthetic polynucleotide
gtaaaatatattaccactaaacattgcagccggattaaaatttacatcgaatgtt

SEQ ID NO: 3027 - DNA, 55 bp, Artificial Sequence
  Synthetic polynucleotide
ttgatgataacatgttcaacaaaccgacaaaggatattagagggtataacaatgt

SEQ ID NO: 3028 - DNA, 55 bp, Artificial Sequence
  Synthetic polynucleotide
ataacaagagaaaagtcaaatgcaaacgagcggacgatttgtagtaagtaaaaat

SEQ ID NO: 3029 - DNA, 55 bp, Artificial Sequence
  Synthetic polynucleotide
aaatcctaggttgagtctgtcgatttatttcggataatacgagaaccatggagac

SEQ ID NO: 3030 - DNA, 55 bp, Artificial Sequence
  Synthetic polynucleotide
cataactcggagagccccacctgattatttaggccattagcgaaaaaataactta

SEQ ID NO: 3031 - DNA, 55 bp, Artificial Sequence
  Synthetic polynucleotide
attatatttgtggtcgcaattacattaattcgggtttcgggaatgatgtgcttta

SEQ ID NO: 3032 - DNA, 55 bp, Artificial Sequence
  Synthetic polynucleotide
agatatacagacgactctcgagaagtatttgggaagatatagagtcgtttggaga

SEQ ID NO: 3033 - DNA, 55 bp, Artificial Sequence
  Synthetic polynucleotide
ttattcaagctctggacagacatcatatatcggccatgagtatatcctaatgtct

SEQ ID NO: 3034 - DNA, 55 bp, Artificial Sequence
  Synthetic polynucleotide
aaatactacaattcttcttgggtgctctttagggctatcaacattctcaaccgat

SEQ ID NO: 3035 - DNA, 55 bp, Artificial Sequence
  Synthetic polynucleotide
tggatagcatagaacacatgctgtctgttgtggaaaatgtctacgaatatggtct

SEQ ID NO: 3036 - DNA, 55 bp, Artificial Sequence
  Synthetic polynucleotide
atcggttctttttatactgtgaagtcagtaaggcgctaaagagtgtaaaaccatg

SEQ ID NO: 3037 - DNA, 55 bp, Artificial Sequence
  Synthetic polynucleotide
tatctgctaacatatgcgcctgcgaaagcatgggtgcattttcattcatttgtat

SEQ ID NO: 3038 - DNA, 55 bp, Artificial Sequence
  Synthetic polynucleotide
ggtactggtaatcgacctaatcgacagcaaaggagactaaacatattattctcct

SEQ ID NO: 3039 - DNA, 55 bp, Artificial Sequence
  Synthetic polynucleotide
aactacagttttgatactagactgacgatcgggctttggaaactagtcatacgat

SEQ ID NO: 3040 - DNA, 55 bp, Artificial Sequence
  Synthetic polynucleotide
tctttaagcattatggcaacattcagcatatggcttagcctgaagactaaaaggg

SEQ ID NO: 3041 - DNA, 55 bp, Artificial Sequence
  Synthetic polynucleotide
cgtaatagtctatatgcgaggtgacaacacaggtattgtgtgttttctaatggtt

SEQ ID NO: 3042 - DNA, 55 bp, Artificial Sequence
  Synthetic polynucleotide
atttataagcatatgtccctagaccgtaggcgggtctttgtatcatacagtgatt

SEQ ID NO: 3043 - DNA, 55 bp, Artificial Sequence
  Synthetic polynucleotide
gaatctatgcctaagacgaggttagatcggaggagtaaatgcataccacttaatt

SEQ ID NO: 3044 - DNA, 55 bp, Artificial Sequence
  Synthetic polynucleotide
aactggtaacgtatatcacgatggataaatcgggagtctggctaagctcgaccaa

SEQ ID NO: 3045 - DNA, 55 bp, Artificial Sequence
  Synthetic polynucleotide
cgacgcacgaatatctcgcggtcgtaaatgaggtatctaatagaatggatatatc

SEQ ID NO: 3046 - DNA, 55 bp, Artificial Sequence
  Synthetic polynucleotide
agaaccctcatctgaactctctactattcttggatacaaaagacggactgtccgg

SEQ ID NO: 3047 - DNA, 55 bp, Artificial Sequence
  Synthetic polynucleotide
agaagtttgctgcgcccgaacttagtaactcggacgaccgtattatgtaacatgt

SEQ ID NO: 3048 - DNA, 55 bp, Artificial Sequence
  Synthetic polynucleotide
gggttgtgaatcatcacactctctgttctttggagtttccaatcgtttagccact

SEQ ID NO: 3049 - DNA, 55 bp, Artificial Sequence
  Synthetic polynucleotide
cttatattggcctcggcctgatagttatctcggtagtatcaccccaaaatatggg

SEQ ID NO: 3050 - DNA, 55 bp, Artificial Sequence
  Synthetic polynucleotide
gacgaatgggttccagcaaaaagtacagcatggtattgccattcccaggattcaa

SEQ ID NO: 3051 - DNA, 55 bp, Artificial Sequence
  Synthetic polynucleotide
ctttggtgttacacttcaatttgctatggccggtgtctaggtgctaaggttacaa

SEQ ID NO: 3052 - DNA, 55 bp, Artificial Sequence
  Synthetic polynucleotide
ttgtaagtacttagcccaacgaatcggtcctggtgggttgattatatcaggaagc

SEQ ID NO: 3053 - DNA, 55 bp, Artificial Sequence
  Synthetic polynucleotide
gttactagagctttcacgtcaggtgaggtatggtatcaagaccatgaatctaaac

SEQ ID NO: 3054 - DNA, 55 bp, Artificial Sequence
  Synthetic polynucleotide
tgagagttgaactgatccgaggtcatctgtgggtagccattttatcagatatggg

SEQ ID NO: 3055 - DNA, 55 bp, Artificial Sequence
  Synthetic polynucleotide
gtggggagattacagaccgtataggtctgaaggcttacattgatactatagggca

SEQ ID NO: 3056 - DNA, 55 bp, Artificial Sequence
  Synthetic polynucleotide
acaccatcggtacatacaagggatttcaggaggcagaatcaactaaacagacaac

SEQ ID NO: 3057 - DNA, 55 bp, Artificial Sequence
  Synthetic polynucleotide
attgatttgctaacgtcatgagtagagggccgggagccaaatatacgacttctta

SEQ ID NO: 3058 - DNA, 55 bp, Artificial Sequence
  Synthetic polynucleotide
gccacttcagtagcttcacaactgaccgatcggtgtgtactacattgatttagta

SEQ ID NO: 3059 - DNA, 55 bp, Artificial Sequence
  Synthetic polynucleotide
ccctgggactacaatgctgtcgtttcatctcggatgtgatcgcactctatacacg

SEQ ID NO: 3060 - DNA, 55 bp, Artificial Sequence
  Synthetic polynucleotide
gccttaggcacactgccggcgtccataatcgggcaaacaactgatggccgcgata

SEQ ID NO: 3061 - DNA, 55 bp, Artificial Sequence
  Synthetic polynucleotide
actgtatcgctatctactaacctggtttcgaggggtgtgcctctcttatcattcc

SEQ ID NO: 3062 - DNA, 55 bp, Artificial Sequence
  Synthetic polynucleotide
tacttattgcctatgtctgttcctctagctgggcaagcctaagggccaaacgcct

SEQ ID NO: 3063 - DNA, 55 bp, Artificial Sequence
  Synthetic polynucleotide
ttaccatcaggttgaccctcttgttgtttctggtgcagggtcgcccggaccccat

SEQ ID NO: 3064 - DNA, 55 bp, Artificial Sequence
  Synthetic polynucleotide
tgactcgacgcttgctcatggtgcgagcctgggtaatctaacaaacgtccatcct

SEQ ID NO: 3065 - DNA, 55 bp, Artificial Sequence
  Synthetic polynucleotide
tggcagagcacagttgcgtccggcagtaaatggcgttctcataaaccttaggaag

SEQ ID NO: 3066 - DNA, 55 bp, Artificial Sequence
  Synthetic polynucleotide
gctagttactgcacagccttcaatttggccagggacgagagagcatgttgagcct

SEQ ID NO: 3067 - DNA, 55 bp, Artificial Sequence
  Synthetic polynucleotide
ctcccggtacacgacccggtcaggtgactctggaaattctgtccggcctaaatat

SEQ ID NO: 3068 - DNA, 55 bp, Artificial Sequence
  Synthetic polynucleotide
agaattattttgaggacaaaaagaaggaactggcccgtttccaggagacccgtcc

SEQ ID NO: 3069 - DNA, 55 bp, Artificial Sequence
  Synthetic polynucleotide
ccgaaccgagtgctgacattgagctaccctagggtctgtacagcggcagactacc

SEQ ID NO: 3070 - DNA, 55 bp, Artificial Sequence
  Synthetic polynucleotide
tgttaaccagtgagaccctttcggcgatgctggatacttatgtcctatccccaaa

SEQ ID NO: 3071 - DNA, 55 bp, Artificial Sequence
  Synthetic polynucleotide
gcccacatccgtcatccgatacttccgagacggatttaaccgatatggctcttac

SEQ ID NO: 3072 - DNA, 55 bp, Artificial Sequence
  Synthetic polynucleotide
acacgcgattaacgatcagaagaccgagtacggtcatgttagtcacgacggacgt

SEQ ID NO: 3073 - DNA, 55 bp, Artificial Sequence
  Synthetic polynucleotide
tcaactatctagaaggctcaagatcccgaatggcctcagtttaagtctaaggggc

SEQ ID NO: 3074 - DNA, 55 bp, Artificial Sequence
  Synthetic polynucleotide
tggggagcaccggcccctgacgggttgtttaggtcatcaccacaggtttggccca

SEQ ID NO: 3075 - DNA, 55 bp, Artificial Sequence
  Synthetic polynucleotide
cggagctccttcgtcgccccactcatttcaaggggctccgcgacattgcttgtcg

SEQ ID NO: 3076 - DNA, 55 bp, Artificial Sequence
  Synthetic polynucleotide
cagcacacgcccgggtcggaatcctcttatgggcactctgatggacggcatgcga

SEQ ID NO: 3077 - DNA, 55 bp, Artificial Sequence
  Synthetic polynucleotide
ccgcgggctggaggagcagcgacaggattttgggtcttgcattcgtgtgactccg

SEQ ID NO: 3078 - DNA, 55 bp, Artificial Sequence
  Synthetic polynucleotide
gttccacgaccactaacccagggtctctatcggtgcatcgccgggctgcggattc

SEQ ID NO: 3079 - DNA, 55 bp, Artificial Sequence
  Synthetic polynucleotide
gggcgcggtatgacgtccccttggcttatgagggcggatacactctctccagcgc

SEQ ID NO: 3080 - DNA, 55 bp, Artificial Sequence
  Synthetic polynucleotide
ctatccggacacggtccctgttccagcgtttggtgtgagcgcggggccgatatag

SEQ ID NO: 3081 - DNA, 55 bp, Artificial Sequence
  Synthetic polynucleotide
agtcgcggcccgccctccgctagcagcgacaggggaagagggtcaaacgggtccg

SEQ ID NO: 3082 - DNA, 55 bp, Artificial Sequence
  Synthetic polynucleotide
tgttcgtgcggctcagcctattaggtcccgagggtttgtaacctgccagcccgcc

SEQ ID NO: 3083 - DNA, 55 bp, Artificial Sequence
  Synthetic polynucleotide
gcgctccaggaccccccaagtcgaatacatcggcaacaagctgtcaggacgacgg

SEQ ID NO: 3084 - DNA, 55 bp, Artificial Sequence
  Synthetic polynucleotide
cagaggacgcgtacatcgcaagtccctgaagggcgtgacacgttggcaaccgggt

SEQ ID NO: 3085 - DNA, 55 bp, Artificial Sequence
  Synthetic polynucleotide
ccccgtctacaccgcgcccacaaaaatcgcgggataacgtcgggcgaatatgccc

SEQ ID NO: 3086 - DNA, 55 bp, Artificial Sequence
  Synthetic polynucleotide
aggcctcccaaacaacccccagaacgtcggcggatggttaacgttctgtgggccc

SEQ ID NO: 3087 - DNA, 55 bp, Artificial Sequence
  Synthetic polynucleotide
tggaccgaccgaccgcctatcgtgcaccgggggtagtccaggagtgaggtcccct

SEQ ID NO: 3088 - DNA, 55 bp, Artificial Sequence
  Synthetic polynucleotide
tgcggtacagtagtacccccacttgacatttggcggtcccgtggagggcagcgca

SEQ ID NO: 3089 - DNA, 55 bp, Artificial Sequence
  Synthetic polynucleotide
taccccttatgtattgcagtcaaataaatttggaccaataaagattacaatccat

SEQ ID NO: 3090 - DNA, 55 bp, Artificial Sequence
  Synthetic polynucleotide
acaaaatgtgcaccggcttgttaaataattgggaatttggaatagagttttaagt

SEQ ID NO: 3091 - DNA, 55 bp, Artificial Sequence
  Synthetic polynucleotide
atcccttagttccatacttacgtaataattcggcaaataagactatgaatttcca

SEQ ID NO: 3092 - DNA, 55 bp, Artificial Sequence
  Synthetic polynucleotide
ttctgaattctgtactcaccttgatagtaagggtatacaatgacgtatgattaaa

SEQ ID NO: 3093 - DNA, 55 bp, Artificial Sequence
  Synthetic polynucleotide
taatttaaatacttatctcggagtcatattaggggaattggatacggaatgtaag

SEQ ID NO: 3094 - DNA, 55 bp, Artificial Sequence
  Synthetic polynucleotide
gtatttttcggaaattccccttagatgttttggcaataataagttatatttccag

SEQ ID NO: 3095 - DNA, 55 bp, Artificial Sequence
  Synthetic polynucleotide
tagtctctttacatgacatgctaatagatctggtgactaataaacttctatgtca

SEQ ID NO: 3096 - DNA, 55 bp, Artificial Sequence
  Synthetic polynucleotide
tataaaaaataggacacatctcagaaaatcggggtccatatcagtaaaaaaacgt

SEQ ID NO: 3097 - DNA, 55 bp, Artificial Sequence
  Synthetic polynucleotide
aattttatagagttgtcgctcgataatatatggagtgtatacttcacgtatacat

SEQ ID NO: 3098 - DNA, 55 bp, Artificial Sequence
  Synthetic polynucleotide
ttcagtaaatttctaccataagtccgccacaggttaaaagtattattgcctttat

SEQ ID NO: 3099 - DNA, 55 bp, Artificial Sequence
  Synthetic polynucleotide
ttacggaataacagtacgatcttaaaggtatggtagatttgacgaataatgagat

SEQ ID NO: 3100 - DNA, 55 bp, Artificial Sequence
  Synthetic polynucleotide
taggtttaccttggatcattcaagaaaaggaggtccaatttaaatatgtgtgtta

SEQ ID NO: 3101 - DNA, 55 bp, Artificial Sequence
  Synthetic polynucleotide
tccgagctgtgtatatcatatgttcaggggaggtaaaatatgttaatttttagaa

SEQ ID NO: 3102 - DNA, 55 bp, Artificial Sequence
  Synthetic polynucleotide
tcatattgatttctggctgataagcatgactggtttagggtgaaaaaagtaaaat

SEQ ID NO: 3103 - DNA, 55 bp, Artificial Sequence
  Synthetic polynucleotide
acatgaggacaacagtctttaaaaatgaggtggcttaacttctataattcgtaaa

SEQ ID NO: 3104 - DNA, 55 bp, Artificial Sequence
  Synthetic polynucleotide
gatcattcattttcaccgtggctcataattgggtataccaggtttaaccctaaac

SEQ ID NO: 3105 - DNA, 55 bp, Artificial Sequence
  Synthetic polynucleotide
taaatttatgcgctttctgtttcatattctaggctcttaacagtacatcctaacg

SEQ ID NO: 3106 - DNA, 55 bp, Artificial Sequence
  Synthetic polynucleotide
tttctggaaacacattcgtaaggattattttggtaacattacggtgccatcggag

SEQ ID NO: 3107 - DNA, 55 bp, Artificial Sequence
  Synthetic polynucleotide
gaaacgtcacttagttcctagcgagtctctgggtagtgaaataagaactttaaga

SEQ ID NO: 3108 - DNA, 55 bp, Artificial Sequence
  Synthetic polynucleotide
tttattgaatccaattcgttggacttatctaggtggcccttctttcaatcggcaa

SEQ ID NO: 3109 - DNA, 55 bp, Artificial Sequence
  Synthetic polynucleotide
ggagttaggcttgttactttatcctttgcaaggttttttagcgtaataacccata

SEQ ID NO: 3110 - DNA, 55 bp, Artificial Sequence
  Synthetic polynucleotide
tccttcccaattgtttctagttcgctgatatggtgtttctaaatacccgatgaga

SEQ ID NO: 3111 - DNA, 55 bp, Artificial Sequence
  Synthetic polynucleotide
aacactccctgttctacagattgcttgtactggtgaacaacatattggtattcaa

SEQ ID NO: 3112 - DNA, 55 bp, Artificial Sequence
  Synthetic polynucleotide
taaatgtattcacaatctgagtggcaatacgggtaaaccattcatagagcaagat

SEQ ID NO: 3113 - DNA, 55 bp, Artificial Sequence
  Synthetic polynucleotide
taaaaaaataaacaggctttctccaactgcaggagacctgacgagagtgtaaact

SEQ ID NO: 3114 - DNA, 55 bp, Artificial Sequence
  Synthetic polynucleotide
cttccagggccttatgcttctaataagcgtaggttctcataggttacaaataatt

SEQ ID NO: 3115 - DNA, 55 bp, Artificial Sequence
  Synthetic polynucleotide
caatctgtctatttgccgagcataagaacatggaatcctccaaagtttgcataca

SEQ ID NO: 3116 - DNA, 55 bp, Artificial Sequence
  Synthetic polynucleotide
ttagtgctatagccctcgataatacaggtagggacgcaactaacataaaataata

SEQ ID NO: 3117 - DNA, 55 bp, Artificial Sequence
  Synthetic polynucleotide
gaatatagcatagaccccttcaagtaacgttgggtccttaaccttttatttttag

SEQ ID NO: 3118 - DNA, 55 bp, Artificial Sequence
  Synthetic polynucleotide
tataggactgagactccagacctatcctgcaggatatgcaataacaattaaccaa

SEQ ID NO: 3119 - DNA, 55 bp, Artificial Sequence
  Synthetic polynucleotide
ttactttcagggaaccctggggtttattctcggctattaacagcaaatatatgcg

SEQ ID NO: 3120 - DNA, 55 bp, Artificial Sequence
  Synthetic polynucleotide
tcctagatggtcaagcctgcgctaatttactgggaacatcaacttggctaaatag

SEQ ID NO: 3121 - DNA, 55 bp, Artificial Sequence
  Synthetic polynucleotide
tatcacgagaactcaccctctgcgttattgtgggttccttatcgctaaaaaagcg

SEQ ID NO: 3122 - DNA, 55 bp, Artificial Sequence
  Synthetic polynucleotide
gagaactttctagagtcatatgcgtgttataggttactatcagatgccgtaagcc

SEQ ID NO: 3123 - DNA, 55 bp, Artificial Sequence
  Synthetic polynucleotide
gggcttgtatctggcgcagcatagaattatcggaaaatactggcagatactgcat

SEQ ID NO: 3124 - DNA, 55 bp, Artificial Sequence
  Synthetic polynucleotide
ctagcttgtgtgagatcacggtacgtttaagggcttacgcttagagattgtgcat

SEQ ID NO: 3125 - DNA, 55 bp, Artificial Sequence
  Synthetic polynucleotide
cactcggtgttaaaaccaggcccgaatagagggtgtagatcagatttaacctcat

SEQ ID NO: 3126 - DNA, 55 bp, Artificial Sequence
  Synthetic polynucleotide
agattttggatatgggccatgtagtatcatcggccgttataggtggcctaaatgt

SEQ ID NO: 3127 - DNA, 55 bp, Artificial Sequence
  Synthetic polynucleotide
agacgtcagtcccgtgcttgataaagtaaatggtcgcaactaatgcctattagac

SEQ ID NO: 3128 - DNA, 55 bp, Artificial Sequence
  Synthetic polynucleotide
tgagggtataatctttctttgtagcaaagatggatatgccactacctgtagcggg

SEQ ID NO: 3129 - DNA, 55 bp, Artificial Sequence
  Synthetic polynucleotide
aaagattgcgtattagcagaagtaagcgctggggccttcttatgaataccaagcc

SEQ ID NO: 3130 - DNA, 55 bp, Artificial Sequence
  Synthetic polynucleotide
accgttaaaaatgacccatacgtcacagagggggtgtccgtcatgataattactc

SEQ ID NO: 3131 - DNA, 55 bp, Artificial Sequence
  Synthetic polynucleotide
gcactgtgatgctacacggaatggaacgtaaggcttcgttagacttggataaaag

SEQ ID NO: 3132 - DNA, 55 bp, Artificial Sequence
  Synthetic polynucleotide
agtgcccgttatgacgcactgaatcgtagaaggcttttttattaacgtctcggct

SEQ ID NO: 3133 - DNA, 55 bp, Artificial Sequence
  Synthetic polynucleotide
ctagatactatgagttcttcaataccgtggtggtctcctccgctaacccactaaa

SEQ ID NO: 3134 - DNA, 55 bp, Artificial Sequence
  Synthetic polynucleotide
acaatgagctgccgcccacgttatgcttctgggattaaggaccgtagcagagggc

SEQ ID NO: 3135 - DNA, 55 bp, Artificial Sequence
  Synthetic polynucleotide
caagcatgttctgtctcggtttacctttccaggcccaaggtcgccgtgtgtctag

SEQ ID NO: 3136 - DNA, 55 bp, Artificial Sequence
  Synthetic polynucleotide
ttgttcagccagtggccgccttgctttctatggtcgatccgtagcatgagattct

SEQ ID NO: 3137 - DNA, 55 bp, Artificial Sequence
  Synthetic polynucleotide
gccatcgccttgacagccctgcaggagttgtggtcactcaacggttgtcgcagag

SEQ ID NO: 3138 - DNA, 55 bp, Artificial Sequence
  Synthetic polynucleotide
tggggttaactatagcccgctacatgaaactggtgtcaccatgatgcccttgtgt

SEQ ID NO: 3139 - DNA, 55 bp, Artificial Sequence
  Synthetic polynucleotide
gagtgtcgagccgacccagtgttgtactctgggccaagtccatcctctgggaaaa

SEQ ID NO: 3140 - DNA, 55 bp, Artificial Sequence
  Synthetic polynucleotide
gccgtactccttattacagggatgttactacggagaacctggccttgttttagcg

SEQ ID NO: 3141 - DNA, 55 bp, Artificial Sequence
  Synthetic polynucleotide
tctgaggtgcgcaatgcaccattagcacccgggtggaattttgaaatgctcatgc

SEQ ID NO: 3142 - DNA, 55 bp, Artificial Sequence
  Synthetic polynucleotide
aatagcaaataggtccccgccagatatgaatggcaacgcaaggtgaggatctccg

SEQ ID NO: 3143 - DNA, 55 bp, Artificial Sequence
  Synthetic polynucleotide
tggtctcgttaatgttctaaagaaccgcagtgggttctggcgtcgtggccagggt

SEQ ID NO: 3144 - DNA, 55 bp, Artificial Sequence
  Synthetic polynucleotide
cctgatctgaaacaagcatccgacaaaccctggtgtcgtcgattattggtcgccc

SEQ ID NO: 3145 - DNA, 55 bp, Artificial Sequence
  Synthetic polynucleotide
cgctggggcgtgtagcccttagtatgtaaccggaggttcgggactatggcgaaga

SEQ ID NO: 3146 - DNA, 55 bp, Artificial Sequence
  Synthetic polynucleotide
tacgttggtcaacgtaccatcatagagaggcggttggacgcactatttcggggta

SEQ ID NO: 3147 - DNA, 55 bp, Artificial Sequence
  Synthetic polynucleotide
atcaaccttcggatctccgatatagcgagatggaaggggggtcaacaccagtcaa

SEQ ID NO: 3148 - DNA, 55 bp, Artificial Sequence
  Synthetic polynucleotide
gaatggaacgacatgaccggtctaacgagatggttaatctcacagcactatgagc

SEQ ID NO: 3149 - DNA, 55 bp, Artificial Sequence
  Synthetic polynucleotide
agtgccatgcccctgcccccccgatgtttcgggagtggggggtatttcgtgcgca

SEQ ID NO: 3150 - DNA, 55 bp, Artificial Sequence
  Synthetic polynucleotide
ctgcccttggggcagtcctggggagattctcggactcgactctcgagacccccat

SEQ ID NO: 3151 - DNA, 55 bp, Artificial Sequence
  Synthetic polynucleotide
agactgacgcgcgctacggcctctatttcgaggcaagacgtgggacgcgggtgga

SEQ ID NO: 3152 - DNA, 55 bp, Artificial Sequence
  Synthetic polynucleotide
aggcatagcacgcttcccggatacagtttgtggcggtcccaaggccttcgcctcc

SEQ ID NO: 3153 - DNA, 55 bp, Artificial Sequence
  Synthetic polynucleotide
cgcgtagatcgacgagcggggacggactctaggctggcttgatcaccctgtccac

SEQ ID NO: 3154 - DNA, 55 bp, Artificial Sequence
  Synthetic polynucleotide
tgagcggcgcggccccctgtcacatcgctttgggagccggagccatgttgtagta

SEQ ID NO: 3155 - DNA, 55 bp, Artificial Sequence
  Synthetic polynucleotide
ccgtcctccgatccaactgtggaccatatgaggcggcatcacccaatccagcgcg

SEQ ID NO: 3156 - DNA, 55 bp, Artificial Sequence
  Synthetic polynucleotide
gtcatgccgtcccttcccccccggcgagttaggatctatcgtgagagctcgcagc

SEQ ID NO: 3157 - DNA, 55 bp, Artificial Sequence
  Synthetic polynucleotide
tcagacaatccgagagcctgagcaataccgggggcgtaggccacactgagcccgg

SEQ ID NO: 3158 - DNA, 55 bp, Artificial Sequence
  Synthetic polynucleotide
ccctgacctcctcagtctatagcccccgcgtggggggtcagcggggacatcaccg

SEQ ID NO: 3159 - DNA, 55 bp, Artificial Sequence
  Synthetic polynucleotide
ctacttaggacatcaacgaagtagaacataaggcgtccgcgcgggcggccgcgcc

SEQ ID NO: 3160 - DNA, 55 bp, Artificial Sequence
  Synthetic polynucleotide
gacgccgcggctgcccctggaacaccatgagggtgcgagcggaggtgagatcatg

SEQ ID NO: 3161 - DNA, 55 bp, Artificial Sequence
  Synthetic polynucleotide
gcctcgcccatacgcgcgaggaccctgtgatggaatttagtccgaacgcttgcgc

SEQ ID NO: 3162 - DNA, 55 bp, Artificial Sequence
  Synthetic polynucleotide
cgtgtagaggcgccgacgctatcttatggcgggtcctcgggtttcgcttcacctg

SEQ ID NO: 3163 - DNA, 55 bp, Artificial Sequence
  Synthetic polynucleotide
agcacccagcggactaccaatgttagacgccggctgtcggtcgcaatcgagctgg

SEQ ID NO: 3164 - DNA, 55 bp, Artificial Sequence
  Synthetic polynucleotide
tatctcgtatatatttcggagcgttaaatctgggaatagtattacgatcattgaa

SEQ ID NO: 3165 - DNA, 55 bp, Artificial Sequence
  Synthetic polynucleotide
cgctacaatcgtatttctatactaatttatcgggtggactttatatcgttaaatg

SEQ ID NO: 3166 - DNA, 55 bp, Artificial Sequence
  Synthetic polynucleotide
ttattttattatatttctgatcaataattttggatagcggcttcgattgaaggta

SEQ ID NO: 3167 - DNA, 55 bp, Artificial Sequence
  Synthetic polynucleotide
acaatagtagaatatccctgtgattgatttaggtatgttatctctcaaaaggtat

SEQ ID NO: 3168 - DNA, 55 bp, Artificial Sequence
  Synthetic polynucleotide
gatatacttaggcgaacgacgtgaaaaataaggctccgtttaaatagtttaaaat

SEQ ID NO: 3169 - DNA, 55 bp, Artificial Sequence
  Synthetic polynucleotide
aggaataagtagttatcaggcatttaaaagtggtaccattcttctttcttacttg

SEQ ID NO: 3170 - DNA, 55 bp, Artificial Sequence
  Synthetic polynucleotide
taattcttatgctaggctgagacaatcatttgggtaccatgaagacatataaaaa

SEQ ID NO: 3171 - DNA, 55 bp, Artificial Sequence
  Synthetic polynucleotide
ttatgattcactctcacatgtcatgtacttcggatttgttttagcttatgatagt

SEQ ID NO: 3172 - DNA, 55 bp, Artificial Sequence
  Synthetic polynucleotide
agctacatcgcagaagcatatttaattacagggattacatgtcatgatatctttt

SEQ ID NO: 3173 - DNA, 55 bp, Artificial Sequence
  Synthetic polynucleotide
ctttttctgacaagttcttacaaaactgaatggaaaatacccaaccttcttactt

SEQ ID NO: 3174 - DNA, 55 bp, Artificial Sequence
  Synthetic polynucleotide
gattatcaagatggatcctaataaattagctggaatatcagttttaaaaagcctt

SEQ ID NO: 3175 - DNA, 55 bp, Artificial Sequence
  Synthetic polynucleotide
gtatcaacctacgattcgattaaaatggtacggttcatgaattaaatatagatta

SEQ ID NO: 3176 - DNA, 55 bp, Artificial Sequence
  Synthetic polynucleotide
tttatttttaatttagccagtactgacaggcggtttattaaaagtgattttgact

SEQ ID NO: 3177 - DNA, 55 bp, Artificial Sequence
  Synthetic polynucleotide
gtccaaatttaaagacctgatatgaaccaaaggtttaaacggtgttcaaaatata

SEQ ID NO: 3178 - DNA, 55 bp, Artificial Sequence
  Synthetic polynucleotide
gttgttgtgactgaatcgaaattcagtggatggcgacaaaataatttaagaataa

SEQ ID NO: 3179 - DNA, 55 bp, Artificial Sequence
  Synthetic polynucleotide
aaccatcatttccgtccaaacatttatttctgggtctagtttcaagaggaatcaa

SEQ ID NO: 3180 - DNA, 55 bp, Artificial Sequence
  Synthetic polynucleotide
ttacggttgacacacacgggtatcttaaattggccatcatggttattgaaaaaag

SEQ ID NO: 3181 - DNA, 55 bp, Artificial Sequence
  Synthetic polynucleotide
acgcattatgagacaacttcctgtttaattcggaacatcagtttaccgacataaa

SEQ ID NO: 3182 - DNA, 55 bp, Artificial Sequence
  Synthetic polynucleotide
ttgtctttctctaaagctatgttagtaattgggtgcagcacctatgttgggtact

SEQ ID NO: 3183 - DNA, 55 bp, Artificial Sequence
  Synthetic polynucleotide
ttgtaaatccgagcatcagtccccgaattaaggtgctagcgaaaaagctattata

SEQ ID NO: 3184 - DNA, 55 bp, Artificial Sequence
  Synthetic polynucleotide
ctcattcatggcctagcctctagcgaattatgggctttcatactagaataaagat

SEQ ID NO: 3185 - DNA, 55 bp, Artificial Sequence
  Synthetic polynucleotide
ttttggtctaatacatctcgttagcagttttggtgacgagaaatgtggctacaag

SEQ ID NO: 3186 - DNA, 55 bp, Artificial Sequence
  Synthetic polynucleotide
ttactccaattctacgctataagacataaccggtcgaactatatgagtcgtagct

SEQ ID NO: 3187 - DNA, 55 bp, Artificial Sequence
  Synthetic polynucleotide
accataaaatttagctcctttctttaggtgcggtaaaggttccatttcttcgtct

SEQ ID NO: 3188 - DNA, 55 bp, Artificial Sequence
  Synthetic polynucleotide
ctactccatagtcagacgaaaatcaaagaggggaattctcagataaatacagtgt

SEQ ID NO: 3189 - DNA, 55 bp, Artificial Sequence
  Synthetic polynucleotide
aatctgtattaggtgaccagcacataagggaggggatacctatcgtatttaatac

SEQ ID NO: 3190 - DNA, 55 bp, Artificial Sequence
  Synthetic polynucleotide
aaatctgagtgtacagcttatatttagagggggggtaagtgattaatagcaacgg

SEQ ID NO: 3191 - DNA, 55 bp, Artificial Sequence
  Synthetic polynucleotide
agaagttgagaatgtgcacagtaatcctggaggaacatatacacatgaagtaaga

SEQ ID NO: 3192 - DNA, 55 bp, Artificial Sequence
  Synthetic polynucleotide
agatatcaatagcccccagatatcaatcggaggaacatccactttcttgatatct

SEQ ID NO: 3193 - DNA, 55 bp, Artificial Sequence
  Synthetic polynucleotide
aatggggccgcgtaaacagaatttcctagtgggattgactattgaaatctagtta

SEQ ID NO: 3194 - DNA, 55 bp, Artificial Sequence
  Synthetic polynucleotide
gtgatgcatggaatgcctcctgacatttctaggtaatctgctccgataaagtcta

SEQ ID NO: 3195 - DNA, 55 bp, Artificial Sequence
  Synthetic polynucleotide
tgcagcacaccgttgtcggatatcttaatttgggcattgtacacctatccatact

SEQ ID NO: 3196 - DNA, 55 bp, Artificial Sequence
  Synthetic polynucleotide
aaatccagtcgctggcccttgtacttaattcggggctttgacttttaaggttcac

SEQ ID NO: 3197 - DNA, 55 bp, Artificial Sequence
  Synthetic polynucleotide
catagccctccaaggacatactgctaattatggtctcacagatagactctaactc

SEQ ID NO: 3198 - DNA, 55 bp, Artificial Sequence
  Synthetic polynucleotide
agcatgtcgccaatagccaccttgactttatggtcccaagtctagtttatggtta

SEQ ID NO: 3199 - DNA, 55 bp, Artificial Sequence
  Synthetic polynucleotide
gtctagataagggatgcagtgaacaaattatggaagctcaagcgagcgcaacttt

SEQ ID NO: 3200 - DNA, 55 bp, Artificial Sequence
  Synthetic polynucleotide
tgtctcggctctttcacaagtaagtattcggggatctctcgaagttgatctacta

SEQ ID NO: 3201 - DNA, 55 bp, Artificial Sequence
  Synthetic polynucleotide
attaggaacaacgtatcagttcttgtggcacggtacctttactgctgaacagaat

SEQ ID NO: 3202 - DNA, 55 bp, Artificial Sequence
  Synthetic polynucleotide
aattgatgtgctttggctccacgaatactgtggtttacaaaagcgcaaacagcag

SEQ ID NO: 3203 - DNA, 55 bp, Artificial Sequence
  Synthetic polynucleotide
gctctagtagtctttgcaagagaacttggttggcctgtatgttagctactttgaa

SEQ ID NO: 3204 - DNA, 55 bp, Artificial Sequence
  Synthetic polynucleotide
tcggtttaggtataatcagcccacgacaaatggttgctgagaacactcctgtaga

SEQ ID NO: 3205 - DNA, 55 bp, Artificial Sequence
  Synthetic polynucleotide
tgggtgtactcctttacactacataaagccaggttacaaatgacagcgtccgata

SEQ ID NO: 3206 - DNA, 55 bp, Artificial Sequence
  Synthetic polynucleotide
tccacaaacaggaagacttcagtacacgcccgggtgttgctaacaatgttttcat

SEQ ID NO: 3207 - DNA, 55 bp, Artificial Sequence
  Synthetic polynucleotide
taagattcgacgtcctcaaacttagacgtgcgggaaagaattcatttcgtagagg

SEQ ID NO: 3208 - DNA, 55 bp, Artificial Sequence
  Synthetic polynucleotide
gccagtcaataggtgacgtcatatcgctgaaggaaaagacttaaaaggctcggtt

SEQ ID NO: 3209 - DNA, 55 bp, Artificial Sequence
  Synthetic polynucleotide
gcgttgtgacttggctcgcgtaacttaaaagggcctgcgtttagattagagaccg

SEQ ID NO: 3210 - DNA, 55 bp, Artificial Sequence
  Synthetic polynucleotide
cggactcctggaaggaccactagattaaatgggcagaagtgcacattggggtagg

SEQ ID NO: 3211 - DNA, 55 bp, Artificial Sequence
  Synthetic polynucleotide
gcaagcacccgagcggccgtttccctttcagggtatgttttgtcaacgtgctctt

SEQ ID NO: 3212 - DNA, 55 bp, Artificial Sequence
  Synthetic polynucleotide
ccctgcctgctcgtagcagctcctatataacggggctgtccataataatagtctg

SEQ ID NO: 3213 - DNA, 55 bp, Artificial Sequence
  Synthetic polynucleotide
gcgggatcaattgagccgttggcttagtaacggacactagcagagatgtgttgca

SEQ ID NO: 3214 - DNA, 55 bp, Artificial Sequence
  Synthetic polynucleotide
cgatcgctgcaggggtctcccgttacatcttggaattattgagtttcggcatggc

SEQ ID NO: 3215 - DNA, 55 bp, Artificial Sequence
  Synthetic polynucleotide
ccctggtaggtgattccaattcccgtagctgggattagctatcagttggcctcat

SEQ ID NO: 3216 - DNA, 55 bp, Artificial Sequence
  Synthetic polynucleotide
accacccgaggcaattcgagcagacgaattaggggtacattgtttgtcacccggg

SEQ ID NO: 3217 - DNA, 55 bp, Artificial Sequence
  Synthetic polynucleotide
cctctgcaccgttattctcaaccgcatctgtggacacactgaagtgaaccaccta

SEQ ID NO: 3218 - DNA, 55 bp, Artificial Sequence
  Synthetic polynucleotide
taacaaaagagactgccctcgaaccgaggttggcctggaaatactggactgggga

SEQ ID NO: 3219 - DNA, 55 bp, Artificial Sequence
  Synthetic polynucleotide
tctcttctcggtccatcccataccgctgggggggcatatgcatagggcatagctt

SEQ ID NO: 3220 - DNA, 55 bp, Artificial Sequence
  Synthetic polynucleotide
ccagtgggtgtcataacttgactctattgcagggtcacgggatgagagctctgtg

SEQ ID NO: 3221 - DNA, 55 bp, Artificial Sequence
  Synthetic polynucleotide
gaggcagtaactgcgcctgttcacaacgagagggtcccaggtaagaacccgactt

SEQ ID NO: 3222 - DNA, 55 bp, Artificial Sequence
  Synthetic polynucleotide
ctgcttcgccggagatcccgaaacaccggctggctaagtgcgattgaaagtacca

SEQ ID NO: 3223 - DNA, 55 bp, Artificial Sequence
  Synthetic polynucleotide
agtggatctaggagatctccttcccaatggtggtctgttatcgtctcccgtacaa

SEQ ID NO: 3224 - DNA, 55 bp, Artificial Sequence
  Synthetic polynucleotide
ccctctctgtgccctcccgctccgttataagggtagtaccaaagcgcccgcccgc

SEQ ID NO: 3225 - DNA, 55 bp, Artificial Sequence
  Synthetic polynucleotide
gctgtgactctcccagcgcgcactataaacaggtacgacgcaggtgagcgcgcag

SEQ ID NO: 3226 - DNA, 55 bp, Artificial Sequence
  Synthetic polynucleotide
atcctgaggatgctcacgcgaagcttaaacagggggcagtgggcccactcgctcc

SEQ ID NO: 3227 - DNA, 55 bp, Artificial Sequence
  Synthetic polynucleotide
cggagcgcaccgcgtgcgacggccaatatctgggttcacgacctagagttgtcga

SEQ ID NO: 3228 - DNA, 55 bp, Artificial Sequence
  Synthetic polynucleotide
gcgacaccggctgcctctgcgctctctaagtggccattgtgggtggcacagcact

SEQ ID NO: 3229 - DNA, 55 bp, Artificial Sequence
  Synthetic polynucleotide
cgcgcgtcccctgctccgactcttagttattggcgtgcccgacttccggcttctg

SEQ ID NO: 3230 - DNA, 55 bp, Artificial Sequence
  Synthetic polynucleotide
gccctcggatccggctcgcttccagcagtgaggatgggtatgccgacgttcaacc

SEQ ID NO: 3231 - DNA, 55 bp, Artificial Sequence
  Synthetic polynucleotide
cgggttggctgggctcccgacgcaccattgtgggctaagaggtgcgtatttcgcc

SEQ ID NO: 3232 - DNA, 55 bp, Artificial Sequence
  Synthetic polynucleotide
ccgtaccccgccgtcgcgccctatactgaagggacgctcaaaaccgtatcctctg

SEQ ID NO: 3233 - DNA, 55 bp, Artificial Sequence
  Synthetic polynucleotide
ggaacattctcctggcctagcctaacaggtaggggcgcgtgggttggtgccacgg

SEQ ID NO: 3234 - DNA, 55 bp, Artificial Sequence
  Synthetic polynucleotide
ccacccagtttaacgacaccactctgcgtaaggacgggatgtctggcgcacgccc

SEQ ID NO: 3235 - DNA, 55 bp, Artificial Sequence
  Synthetic polynucleotide
ccctcggtgcataagacctcctcgtccggtgggggttcttcatgcttacgagggg

SEQ ID NO: 3236 - DNA, 55 bp, Artificial Sequence
  Synthetic polynucleotide
tcccccccggtagtgacgcaatcacaagagggggtgctacccacgaggggagcga

SEQ ID NO: 3237 - DNA, 55 bp, Artificial Sequence
  Synthetic polynucleotide
acggtggcgagggcctccacttaacacggatgggagtgggggcaataaccccgac

SEQ ID NO: 3238 - DNA, 55 bp, Artificial Sequence
  Synthetic polynucleotide
ccagtcactagatcagcaactccgctgggtaggacgggttcggtcacccgtgctg

SEQ ID NO: 3239 - DNA, 55 bp, Artificial Sequence
  Synthetic polynucleotide
tatgttgttgatccttcctataggtaatttaggtattatccttagaaaaagacgg

SEQ ID NO: 3240 - DNA, 55 bp, Artificial Sequence
  Synthetic polynucleotide
attacaagcattctgtctgggtagtattctgggttctatagattactttaaacat

SEQ ID NO: 3241 - DNA, 55 bp, Artificial Sequence
  Synthetic polynucleotide
tggttttcctaaagtgcaatggttatttattggttatttcataggttatgataga

SEQ ID NO: 3242 - DNA, 55 bp, Artificial Sequence
  Synthetic polynucleotide
ggcattatgtaaagcccattcggatttctttggatttaatttttgtgcattgttt

SEQ ID NO: 3243 - DNA, 55 bp, Artificial Sequence
  Synthetic polynucleotide
tataataatatatatgctgggcactctatagggcacttatgattaatcataggtt

SEQ ID NO: 3244 - DNA, 55 bp, Artificial Sequence
  Synthetic polynucleotide
tcacagtttgcatttacacataatttgatttgggtctgataccacaatataattg

SEQ ID NO: 3245 - DNA, 55 bp, Artificial Sequence
  Synthetic polynucleotide
tatttcagtattattacttgaaaaaggaaagggaggtatgggaataatacctacg

SEQ ID NO: 3246 - DNA, 55 bp, Artificial Sequence
  Synthetic polynucleotide
gatatttattaatgtcctttgtgggtttgaagggtttttgagatattgctctttt

SEQ ID NO: 3247 - DNA, 55 bp, Artificial Sequence
  Synthetic polynucleotide
gacttgcttatacggtctaaaggtaataaaaggttaatttttgataataataatg

SEQ ID NO: 3248 - DNA, 55 bp, Artificial Sequence
  Synthetic polynucleotide
actataatgttagttgcaatgactaaccaatggcaaacatatgtatctactctaa

SEQ ID NO: 3249 - DNA, 55 bp, Artificial Sequence
  Synthetic polynucleotide
actatgggttataaagctgtaagagctaagaggtagcttttaatcattacataac

SEQ ID NO: 3250 - DNA, 55 bp, Artificial Sequence
  Synthetic polynucleotide
aatatcattgattacacatagtggattgattggatacggtgatgaaattctatat

SEQ ID NO: 3251 - DNA, 55 bp, Artificial Sequence
  Synthetic polynucleotide
ttagacgtactcgaacctaagaaacaaagtaggaaacaacattcacaatttcaat

SEQ ID NO: 3252 - DNA, 55 bp, Artificial Sequence
  Synthetic polynucleotide
aataattggatacgcgcaaattagaccagacggagccaactataataattatata

SEQ ID NO: 3253 - DNA, 55 bp, Artificial Sequence
  Synthetic polynucleotide
aattcaagagaaatgtcgatcatgaagtgaaggagatgtatttaagaccatttta

SEQ ID NO: 3254 - DNA, 55 bp, Artificial Sequence
  Synthetic polynucleotide
ttccgcatttccatatcactttcgtagtttcggatgtcgtaattttcgaactcga

SEQ ID NO: 3255 - DNA, 55 bp, Artificial Sequence
  Synthetic polynucleotide
ctgtgtataccttgttctgttggtctttcttggcatattgtacagattttctagc

SEQ ID NO: 3256 - DNA, 55 bp, Artificial Sequence
  Synthetic polynucleotide
gaacatcatctaatagctgcgtggtaaatgtggtaaaaagagtcaggtaaatttg

SEQ ID NO: 3257 - DNA, 55 bp, Artificial Sequence
  Synthetic polynucleotide
ttagtcaaattcgaagcgtttgccggaatccggagaagccagaaattttagattt

SEQ ID NO: 3258 - DNA, 55 bp, Artificial Sequence
  Synthetic polynucleotide
caacatatagatcaaacagtgtttggatttgggactaagttgttcacgaggaatg

SEQ ID NO: 3259 - DNA, 55 bp, Artificial Sequence
  Synthetic polynucleotide
aggttttctaaaggagcgattgcggtattttggtagcttgcactaaatcaaaatt

SEQ ID NO: 3260 - DNA, 55 bp, Artificial Sequence
  Synthetic polynucleotide
aagatatgcaggatcacattcagtggattgtggtgtcatttcggatcattgattg

SEQ ID NO: 3261 - DNA, 55 bp, Artificial Sequence
  Synthetic polynucleotide
gggttctgatatttagctcgtgtatagataggggtaacaatccatagtagcttaa

SEQ ID NO: 3262 - DNA, 55 bp, Artificial Sequence
  Synthetic polynucleotide
tctcacagccattacgcgatttatgggtgttggggtcatagaaaagactatttta

SEQ ID NO: 3263 - DNA, 55 bp, Artificial Sequence
  Synthetic polynucleotide
acattatacacatacacccgatccaggaacaggtaaagtacctcaagtcagaaaa

SEQ ID NO: 3264 - DNA, 55 bp, Artificial Sequence
  Synthetic polynucleotide
cgtttgcgtatgttatcgatgcgatcacgatggacaatgccttcatttcatttat

SEQ ID NO: 3265 - DNA, 55 bp, Artificial Sequence
  Synthetic polynucleotide
ctttcactcaaatagactatcaggcatcataggcaacgaagactattagagtgtc

SEQ ID NO: 3266 - DNA, 55 bp, Artificial Sequence
  Synthetic polynucleotide
gcttaatgattaatgacttgaagacaagacagggagtaattaagacctaggtacg

SEQ ID NO: 3267 - DNA, 55 bp, Artificial Sequence
  Synthetic polynucleotide
caattagcgaaaattccattaggtcaccacaggtttgcatgtcattatcacacgt

SEQ ID NO: 3268 - DNA, 55 bp, Artificial Sequence
  Synthetic polynucleotide
acactgctcataagcgctcaagatgaatgaaggtgcagaaattgaaccattgtta

SEQ ID NO: 3269 - DNA, 55 bp, Artificial Sequence
  Synthetic polynucleotide
gttaaggagttctttgcactttggttagttgggttaacaccaatcgtgtcgagcg

SEQ ID NO: 3270 - DNA, 55 bp, Artificial Sequence
  Synthetic polynucleotide
gttgttaccggtggtacgtatgggataaatgggaaatgacaaacgtgtatagagc

SEQ ID NO: 3271 - DNA, 55 bp, Artificial Sequence
  Synthetic polynucleotide
taagatttgcatctctccttgtgggcttcagggccattggtatatcagtaattca

SEQ ID NO: 3272 - DNA, 55 bp, Artificial Sequence
  Synthetic polynucleotide
ttagtaggctatctcactgctatttagttaggggctgtgcaaaacagacgtgagc

SEQ ID NO: 3273 - DNA, 55 bp, Artificial Sequence
  Synthetic polynucleotide
tggtgaatctagtggtccattcgggtattcgggcacaaaatggtggtaatactgt

SEQ ID NO: 3274 - DNA, 55 bp, Artificial Sequence
  Synthetic polynucleotide
tcatgcttgatacaggcatcctccttgtcttggtttcgtttcgacctatagtaat

SEQ ID NO: 3275 - DNA, 55 bp, Artificial Sequence
  Synthetic polynucleotide
gccatcacttattatgcgtagcacgagataaggacgagagttatcttacacgtgt

SEQ ID NO: 3276 - DNA, 55 bp, Artificial Sequence
  Synthetic polynucleotide
acagacgatgtagagacccatgtcaggccagggacataaattttattgtagggct

SEQ ID NO: 3277 - DNA, 55 bp, Artificial Sequence
  Synthetic polynucleotide
caactcttctatggggctaggtaagcagctaggcagttttttttactagttggtg

SEQ ID NO: 3278 - DNA, 55 bp, Artificial Sequence
  Synthetic polynucleotide
ctttaaagtgtgaacgcgttccggcagacccgggtgttaaatgtaaatttacatg

SEQ ID NO: 3279 - DNA, 55 bp, Artificial Sequence
  Synthetic polynucleotide
tttacgaatccttcatccaagggtagagactggtagactgggacttcgaattaat

SEQ ID NO: 3280 - DNA, 55 bp, Artificial Sequence
  Synthetic polynucleotide
agagttcaaggaaaagccttaaacggccaaaggccaatcacaatttgcaacgtcc

SEQ ID NO: 3281 - DNA, 55 bp, Artificial Sequence
  Synthetic polynucleotide
tccatgcgatgaagtaccgatattgctcgccggaattgctatctcattatccaag

SEQ ID NO: 3282 - DNA, 55 bp, Artificial Sequence
  Synthetic polynucleotide
tctagtctttatagtccgaaacctgacacctggcacctagatttaacttcgtact

SEQ ID NO: 3283 - DNA, 55 bp, Artificial Sequence
  Synthetic polynucleotide
ctataacaggaaagcgcaggaccttaccgcagggatactgaattaagttgatgtt

SEQ ID NO: 3284 - DNA, 55 bp, Artificial Sequence
  Synthetic polynucleotide
acgttaacaaacaattccgggcgtaatttccgggagccaggtccgactgatctca

SEQ ID NO: 3285 - DNA, 55 bp, Artificial Sequence
  Synthetic polynucleotide
tgtccgttacataagtccgttagggtttaagggaaactggccggattggccctgg

SEQ ID NO: 3286 - DNA, 55 bp, Artificial Sequence
  Synthetic polynucleotide
aaaaggaatggtcactctatccgggtttaacgggcccgaccggtcaaccaaaacc

SEQ ID NO: 3287 - DNA, 55 bp, Artificial Sequence
  Synthetic polynucleotide
ctacactggttgcatccttgacgcataccttggcgcggccaggaggaagttagga

SEQ ID NO: 3288 - DNA, 55 bp, Artificial Sequence
  Synthetic polynucleotide
atggtgccacaaatttcagccggaacaaaccggaccctttacgtgagaacgtgtc

SEQ ID NO: 3289 - DNA, 55 bp, Artificial Sequence
  Synthetic polynucleotide
cagtctggaccaaaagcgtgcttctgatctgggatctcttacacccttcgtggtc

SEQ ID NO: 3290 - DNA, 55 bp, Artificial Sequence
  Synthetic polynucleotide
cccgtaacgtacagggcatcataggtgcctcggtgttttctatccacgggcccta

SEQ ID NO: 3291 - DNA, 55 bp, Artificial Sequence
  Synthetic polynucleotide
ctgcgagaacttatgccgactttgcagttgcggagggcgaggaggttgaaggaac

SEQ ID NO: 3292 - DNA, 55 bp, Artificial Sequence
  Synthetic polynucleotide
aactggttcgctgtcccaactttcgtggcgtgggaggttttaggtaaatcagggg

SEQ ID NO: 3293 - DNA, 55 bp, Artificial Sequence
  Synthetic polynucleotide
gctctaacttagttgtcgtagtgggcgcgaaggtgggccacattcgtttgttgct

SEQ ID NO: 3294 - DNA, 55 bp, Artificial Sequence
  Synthetic polynucleotide
ttacgcgggttataagcgcgtaggcaatggtggcaatcaaacgttagttctgcgc

SEQ ID NO: 3295 - DNA, 55 bp, Artificial Sequence
  Synthetic polynucleotide
cgaaataacaggagttcctcttaccggatccggacacaatgacctatggtccgct

SEQ ID NO: 3296 - DNA, 55 bp, Artificial Sequence
  Synthetic polynucleotide
tacagcctagcacctaccagacctcaactcaggcgggaaacttataaaccgcact

SEQ ID NO: 3297 - DNA, 55 bp, Artificial Sequence
  Synthetic polynucleotide
tgacgctatagcggtcccgtaaaacagaacagggggagccgcggtatcggtcgga

SEQ ID NO: 3298 - DNA, 55 bp, Artificial Sequence
  Synthetic polynucleotide
actagcaattagtaaacatctatgcggaggcgggttactaccagcacgaggtcga

SEQ ID NO: 3299 - DNA, 55 bp, Artificial Sequence
  Synthetic polynucleotide
gcgcgggactcaggacctggcgcttattcttggcgctgtcaccggaacgtgcgag

SEQ ID NO: 3300 - DNA, 55 bp, Artificial Sequence
  Synthetic polynucleotide
atcgccgtcctcgacactcatggcctttccaggccgttggagcccggagtctact

SEQ ID NO: 3301 - DNA, 55 bp, Artificial Sequence
  Synthetic polynucleotide
gcgggtacgcaatccccgcactggacttctgggatccatagtacaggacccgcac

SEQ ID NO: 3302 - DNA, 55 bp, Artificial Sequence
  Synthetic polynucleotide
gcgattgccccgcgtccaggaggcagtttatggtggcaggactggtgtgtagacg

SEQ ID NO: 3303 - DNA, 55 bp, Artificial Sequence
  Synthetic polynucleotide
gtcgaagtagggcgccccgtcgctacttactggctagaattccgaacgggctcgg

SEQ ID NO: 3304 - DNA, 55 bp, Artificial Sequence
  Synthetic polynucleotide
gcgcgatgaaccgcgacgcggtccggcgttgggccaaaagtaaggaaatcccgct

SEQ ID NO: 3305 - DNA, 55 bp, Artificial Sequence
  Synthetic polynucleotide
ccaggaagagctactccatcactgggacttgggcgcgcctcgggccccaattagg

SEQ ID NO: 3306 - DNA, 55 bp, Artificial Sequence
  Synthetic polynucleotide
ccgtccgcggcggctccggcgacacgagacaggaaacaaacacacgctggcccgg

SEQ ID NO: 3307 - DNA, 55 bp, Artificial Sequence
  Synthetic polynucleotide
cacacttgacttcgcccgttaacggggcaacggatcagagagttgcgcgcggcgg

SEQ ID NO: 3308 - DNA, 55 bp, Artificial Sequence
  Synthetic polynucleotide
cacctccttcttcggccccggtacaacgtacggtaggactagtcgccggtcacca

SEQ ID NO: 3309 - DNA, 55 bp, Artificial Sequence
  Synthetic polynucleotide
ctttacccaggtccggcggaagcggacgacaggaccataaccatgtcacctggcc

SEQ ID NO: 3310 - DNA, 55 bp, Artificial Sequence
  Synthetic polynucleotide
tgttcctgaaggccgtctcccttgacgagacggaagagcaccgtcgggatggccc

SEQ ID NO: 3311 - DNA, 55 bp, Artificial Sequence
  Synthetic polynucleotide
tcggtgcgagttcatcccaactgtccgggccggaactccggagctcttggtgtgt

SEQ ID NO: 3312 - DNA, 55 bp, Artificial Sequence
  Synthetic polynucleotide
cctgcgtggagatctgccaggctctccaggcggtcataaactacgcgcccgtacg

SEQ ID NO: 3313 - DNA, 55 bp, Artificial Sequence
  Synthetic polynucleotide
ccagttcaaaagacacctcttctgcagcgcaggatcacgggcagcactgccgccc

SEQ ID NO: 3314 - DNA, 55 bp, Artificial Sequence
  Synthetic polynucleotide
tgaaagggcaaatctacaaaaataataaataggcttcaactcaccataattcact

SEQ ID NO: 3315 - DNA, 55 bp, Artificial Sequence
  Synthetic polynucleotide
tatagcctttcagggactatttgctatttatggcatgctatttatttgagtaact

SEQ ID NO: 3316 - DNA, 55 bp, Artificial Sequence
  Synthetic polynucleotide
gtggttactattacctcgtttctataattttggttctatatgataatgtataact

SEQ ID NO: 3317 - DNA, 55 bp, Artificial Sequence
  Synthetic polynucleotide
cttaaatgctccggtgcaaatagggaataatggaaatacaatagtttattctatg

SEQ ID NO: 3318 - DNA, 55 bp, Artificial Sequence
  Synthetic polynucleotide
actagcataagtaatcctaatggggatattaggatgttatggatttgatctttac

SEQ ID NO: 3319 - DNA, 55 bp, Artificial Sequence
  Synthetic polynucleotide
aaatggaggcgaaatgccttaaattgaatgaggtaataaattttaataatagcag

SEQ ID NO: 3320 - DNA, 55 bp, Artificial Sequence
  Synthetic polynucleotide
aaattgattgaaattgctaatttcaggacaaggctgttttttcagtctttgggtt

SEQ ID NO: 3321 - DNA, 55 bp, Artificial Sequence
  Synthetic polynucleotide
ggattagaatgaaagtcagagtagacatagagggaatacatataaagttttgcaa

SEQ ID NO: 3322 - DNA, 55 bp, Artificial Sequence
  Synthetic polynucleotide
ttattaatgtgttcacctggtaaagggttaaggatctgtacaatagtatggatta

SEQ ID NO: 3323 - DNA, 55 bp, Artificial Sequence
  Synthetic polynucleotide
tgattaaacatacaagctagtataaaggaaagggagtgtgcagatatataacgat

SEQ ID NO: 3324 - DNA, 55 bp, Artificial Sequence
  Synthetic polynucleotide
cattacatatgtgctactgatcgggtaggagggatataatatatattaatagttt

SEQ ID NO: 3325 - DNA, 55 bp, Artificial Sequence
  Synthetic polynucleotide
aagagtatatttcacacacgtttataaccacggattccttataaacgttgaaatt

SEQ ID NO: 3326 - DNA, 55 bp, Artificial Sequence
  Synthetic polynucleotide
ttgcataacaataaatcctatgaacaacaacggaaacatgataagatgtagcgat

SEQ ID NO: 3327 - DNA, 55 bp, Artificial Sequence
  Synthetic polynucleotide
tttaagataatttaaccgttagaacgacgaaggttatcaacagaactaaatggac

SEQ ID NO: 3328 - DNA, 55 bp, Artificial Sequence
  Synthetic polynucleotide
aaatagtggatttggccatgatagatctgatggccttagagatttatttttttct

SEQ ID NO: 3329 - DNA, 55 bp, Artificial Sequence
  Synthetic polynucleotide
atttatttatagttggctggtttgtcttctcggtctcttagctgtttaggcacag

SEQ ID NO: 3330 - DNA, 55 bp, Artificial Sequence
  Synthetic polynucleotide
aaaattattccaattgctattgcgtcttcttggacggatctcatgctctgtcgat

SEQ ID NO: 3331 - DNA, 55 bp, Artificial Sequence
  Synthetic polynucleotide
taaatacgacgtaattcgggtttggtatctcggtttaatggataagagtatagtt

SEQ ID NO: 3332 - DNA, 55 bp, Artificial Sequence
  Synthetic polynucleotide
ggaagacgcattaaaccagttggtaatttggggcagataagtaagttaattcata

SEQ ID NO: 3333 - DNA, 55 bp, Artificial Sequence
  Synthetic polynucleotide
agtgatagtaagtggtctctcctatgattgaggtgtaaagagaaagatcgtcgaa

SEQ ID NO: 3334 - DNA, 55 bp, Artificial Sequence
  Synthetic polynucleotide
gttacaatttcgttctctaatgtctgattctggatctggtgtttctgttggataa

SEQ ID NO: 3335 - DNA, 55 bp, Artificial Sequence
  Synthetic polynucleotide
tgttccggacataatgcacttgggaggaattggattatgaagctgaatgatcatt

SEQ ID NO: 3336 - DNA, 55 bp, Artificial Sequence
  Synthetic polynucleotide
taagaacataaacacgcaggggactcataagggcaatcattaggcaatttagatt

SEQ ID NO: 3337 - DNA, 55 bp, Artificial Sequence
  Synthetic polynucleotide
gcaatagtttaaagttctctggctagactggggccgtcatttctttagaatgaat

SEQ ID NO: 3338 - DNA, 55 bp, Artificial Sequence
  Synthetic polynucleotide
cttatgaaaccaggttctagtttatggtgggggagaatttcaattgagataagcc

SEQ ID NO: 3339 - DNA, 55 bp, Artificial Sequence
  Synthetic polynucleotide
cttatgaaatcatacacgctctgggatggtaggggttagacgatacattgattaa

SEQ ID NO: 3340 - DNA, 55 bp, Artificial Sequence
  Synthetic polynucleotide
cttactttccaaagtacaatgtaacgcaagcggtaaaataaattcgcaaccgggt

SEQ ID NO: 3341 - DNA, 55 bp, Artificial Sequence
  Synthetic polynucleotide
atgaagagcataggagctcaatagaaccataggaaacaatcatcactattcctgt

SEQ ID NO: 3342 - DNA, 55 bp, Artificial Sequence
  Synthetic polynucleotide
tgtttgagttaccaatcagaccaacacgactggtacatatcaaaccatgttctat

SEQ ID NO: 3343 - DNA, 55 bp, Artificial Sequence
  Synthetic polynucleotide
tttgccataagaaacacaggagagacagactggaaaagcctcattctgatgtttt

SEQ ID NO: 3344 - DNA, 55 bp, Artificial Sequence
  Synthetic polynucleotide
atatggccgcgcaattccgttgcatggttttggtttaagccgtttcaatttgctt

SEQ ID NO: 3345 - DNA, 55 bp, Artificial Sequence
  Synthetic polynucleotide
catcgattttaatgggcctttacattctttcggtagcacccatgctcttcttcct

SEQ ID NO: 3346 - DNA, 55 bp, Artificial Sequence
  Synthetic polynucleotide
ggatagcaccggaatacaacgggaaattatgggaggccttaaaaacctaaggtga

SEQ ID NO: 3347 - DNA, 55 bp, Artificial Sequence
  Synthetic polynucleotide
ctggattcgcaaataactgcgttgggactgaggagaaggatagtacgttattcct

SEQ ID NO: 3348 - DNA, 55 bp, Artificial Sequence
  Synthetic polynucleotide
tgtttagctgggctgtcatttggcagctataggccttggatctacttaaagagaa

SEQ ID NO: 3349 - DNA, 55 bp, Artificial Sequence
  Synthetic polynucleotide
caactgtcactccgagcggttgtgttggtttggcgagacaactaataaatttgag

SEQ ID NO: 3350 - DNA, 55 bp, Artificial Sequence
  Synthetic polynucleotide
cacatgtaattctgggcccagatggttgtttggtcttaacaatcaggattgtccg

SEQ ID NO: 3351 - DNA, 55 bp, Artificial Sequence
  Synthetic polynucleotide
tatccggtatttcttgcccgtaaaagggctagggtggtaaaatcctctcaggatt

SEQ ID NO: 3352 - DNA, 55 bp, Artificial Sequence
  Synthetic polynucleotide
gcttagcctataagtactggtttgggactctggcgctttttgcagtaacacatac

SEQ ID NO: 3353 - DNA, 55 bp, Artificial Sequence
  Synthetic polynucleotide
tagctttgataagacccgatatgtagagaatggggtagacgagtgagtatcctga

SEQ ID NO: 3354 - DNA, 55 bp, Artificial Sequence
  Synthetic polynucleotide
gtcttaaggtgcgggacaaccttaatgaaccggtaaacaatgccagaattctgtc

SEQ ID NO: 3355 - DNA, 55 bp, Artificial Sequence
  Synthetic polynucleotide
ttatgcgagtatatcgcaaagcttagggtgaggcgagtcttagatgatagagagt

SEQ ID NO: 3356 - DNA, 55 bp, Artificial Sequence
  Synthetic polynucleotide
gtgacgcctcaatactcgctactcgtacacgggtaataacctaggcgtttaatta

SEQ ID NO: 3357 - DNA, 55 bp, Artificial Sequence
  Synthetic polynucleotide
cgtctaaattgagtgccctaagatgtgatgaggagcaagatttcctcgttttgct

SEQ ID NO: 3358 - DNA, 55 bp, Artificial Sequence
  Synthetic polynucleotide
ggtatatctgttggctctaaaaggcaccaaggggtaatgcaaaagatgtcggttt

SEQ ID NO: 3359 - DNA, 55 bp, Artificial Sequence
  Synthetic polynucleotide
tcgtcaagcctgctctcgtccccgtaaaaccggcgcacattgttgttcagtacct

SEQ ID NO: 3360 - DNA, 55 bp, Artificial Sequence
  Synthetic polynucleotide
ggcaaattacgtcgctcacccggcttaaatcgggtaaagctcttctcggctggac

SEQ ID NO: 3361 - DNA, 55 bp, Artificial Sequence
  Synthetic polynucleotide
tgcagccctagtccctcgcatgtcctttcttggttgacccggcttgattatagcg

SEQ ID NO: 3362 - DNA, 55 bp, Artificial Sequence
  Synthetic polynucleotide
agttcccaataatccccggtggcaatcttgcggtcgcatcccgaacacctgcgtt

SEQ ID NO: 3363 - DNA, 55 bp, Artificial Sequence
  Synthetic polynucleotide
gcatggcgttccgctgcgccaagttgaatgaggctcggtaatagtgcaccggata

SEQ ID NO: 3364 - DNA, 55 bp, Artificial Sequence
  Synthetic polynucleotide
ctagacgttttgtcttcgtactggcttccggggcctcccgtgagggtttcttacc

SEQ ID NO: 3365 - DNA, 55 bp, Artificial Sequence
  Synthetic polynucleotide
acgtggccatttgtatctacgggtagccttcgggctaccagtactttcggtcaca

SEQ ID NO: 3366 - DNA, 55 bp, Artificial Sequence
  Synthetic polynucleotide
cgaacgaaccgacgctcaaatgggtactcgtggggccatcgttacgcaaatgcat

SEQ ID NO: 3367 - DNA, 55 bp, Artificial Sequence
  Synthetic polynucleotide
ctactaccacctatcacggcggaaacattacgggcgctgatcgttttgacatgtt

SEQ ID NO: 3368 - DNA, 55 bp, Artificial Sequence
  Synthetic polynucleotide
gagtgcattcagaacacactagtggctgttaggcttacgcgcactatagctccgc

SEQ ID NO: 3369 - DNA, 55 bp, Artificial Sequence
  Synthetic polynucleotide
atcatttcccctggagctaatatctgaggctggagcagctcggacatagggattc

SEQ ID NO: 3370 - DNA, 55 bp, Artificial Sequence
  Synthetic polynucleotide
ccaaggataaacggagccctcgtaggacgatggatcctcagacgtttaaccgcta

SEQ ID NO: 3371 - DNA, 55 bp, Artificial Sequence
  Synthetic polynucleotide
gcgcattggtagtctgcataggataggtgcaggtcatgttcacgtgtcttcagta

SEQ ID NO: 3372 - DNA, 55 bp, Artificial Sequence
  Synthetic polynucleotide
cgtctctaatgcaccccactgattgaccactggagcgatgtccgggtcggtcaga

SEQ ID NO: 3373 - DNA, 55 bp, Artificial Sequence
  Synthetic polynucleotide
aataaaattcggatcaccgagattcgaggagggtcggcccataacggtaacttgc

SEQ ID NO: 3374 - DNA, 55 bp, Artificial Sequence
  Synthetic polynucleotide
aactgctgtggctgagctgggcacacatttgggccgctgccgttatccgggggtc

SEQ ID NO: 3375 - DNA, 55 bp, Artificial Sequence
  Synthetic polynucleotide
tacgggccccgcactgcgactgctggaattaggacaccgacgccacgtctgggta

SEQ ID NO: 3376 - DNA, 55 bp, Artificial Sequence
  Synthetic polynucleotide
ccaggatttgccagcactgctagcgtttctaggcgacggggcaggaatcccctgc

SEQ ID NO: 3377 - DNA, 55 bp, Artificial Sequence
  Synthetic polynucleotide
gagcaagagtagctggcacacggcctctatcggcgcaggagactgagatgggcca

SEQ ID NO: 3378 - DNA, 55 bp, Artificial Sequence
  Synthetic polynucleotide
agagctatggcagctgccgtgctcatgcctcggggaattcgagctcatcctccgg

SEQ ID NO: 3379 - DNA, 55 bp, Artificial Sequence
  Synthetic polynucleotide
ttcctccctccttggccagccacgcgaactcggaatttcacttacacccgggccg

SEQ ID NO: 3380 - DNA, 55 bp, Artificial Sequence
  Synthetic polynucleotide
cgccccctgatattaccgcgcgcggacacaaggagcgaccagtaccaagaggtac

SEQ ID NO: 3381 - DNA, 55 bp, Artificial Sequence
  Synthetic polynucleotide
aggtcaacgccacgaccccacacgacgtcgtggttaatccccgtgccccagtttg

SEQ ID NO: 3382 - DNA, 55 bp, Artificial Sequence
  Synthetic polynucleotide
acgcggctgagacctcccttgcggtggagttggcagtcgacggcagacccgatgg

SEQ ID NO: 3383 - DNA, 55 bp, Artificial Sequence
  Synthetic polynucleotide
tgtggctgatcccgttcggagtgccctagtcggatggctgcaggacgacgtctca

SEQ ID NO: 3384 - DNA, 55 bp, Artificial Sequence
  Synthetic polynucleotide
ttgggcgtggcccatacctgagcgacggagaggcactcactatgccctgatacgc

SEQ ID NO: 3385 - DNA, 55 bp, Artificial Sequence
  Synthetic polynucleotide
aaaccctaattcgagccacaagcgtgactgagggccgtgccccaaactggcgccg

SEQ ID NO: 3386 - DNA, 55 bp, Artificial Sequence
  Synthetic polynucleotide
aagccgtggcctggtacttagcatgaaagcgggtcgcgttgtgcgcacgcgagcg

SEQ ID NO: 3387 - DNA, 55 bp, Artificial Sequence
  Synthetic polynucleotide
gtcagaacgaactccgcaagacctatgagacggcgtccctggagcgcgaaccacc

SEQ ID NO: 3388 - DNA, 55 bp, Artificial Sequence
  Synthetic polynucleotide
ccatttatcgcggtcccacgatagccaggttggttgccatcggccgcctccatcc

SEQ ID NO: 3389 - DNA, 55 bp, Artificial Sequence
  Synthetic polynucleotide
caagggttataaacgtcttagtagttatttaggaaagtcttggttatactattgc

SEQ ID NO: 3390 - DNA, 55 bp, Artificial Sequence
  Synthetic polynucleotide
gatcatttattggcttctgagtgtttaattgggttttaatatacgattattgagt

SEQ ID NO: 3391 - DNA, 55 bp, Artificial Sequence
  Synthetic polynucleotide
tggtattacagtataaccaattatttaattaggatatttacgacttacaaatttc

SEQ ID NO: 3392 - DNA, 55 bp, Artificial Sequence
  Synthetic polynucleotide
gattgatgtctaggatcttatacgattatccggatctatctctttttcattgttt

SEQ ID NO: 3393 - DNA, 55 bp, Artificial Sequence
  Synthetic polynucleotide
taagattaagcgagttcaaggagttaatagaggattaagtttaaactaatagtcg

SEQ ID NO: 3394 - DNA, 55 bp, Artificial Sequence
  Synthetic polynucleotide
cacttaggccagattgccaaaagaatataaaggcaatatcaggttctaatttttt

SEQ ID NO: 3395 - DNA, 55 bp, Artificial Sequence
  Synthetic polynucleotide
tttaactatgttcagtcggtttgatcgtattggtttatcaaggtacttgtaaatt

SEQ ID NO: 3396 - DNA, 55 bp, Artificial Sequence
  Synthetic polynucleotide
aacgactgtgatagttcaaatgtaatgttgtggagtaatagttttatcgtttcct

SEQ ID NO: 3397 - DNA, 55 bp, Artificial Sequence
  Synthetic polynucleotide
taaaatggcctaagtgcgccactaaaataaagggcaatctattaatgttattatc

SEQ ID NO: 3398 - DNA, 55 bp, Artificial Sequence
  Synthetic polynucleotide
gttcaatgcaagatgaccctatataaacaaaggataaatcgaaaataagtgatta

SEQ ID NO: 3399 - DNA, 55 bp, Artificial Sequence
  Synthetic polynucleotide
aaaaacacataagaaactacctcaagtaaaaggtctaaagttacgtttgttcagt

SEQ ID NO: 3400 - DNA, 55 bp, Artificial Sequence
  Synthetic polynucleotide
ttttaatactaggtcacgggagttgtgagagggtataatttttttaattatttac

SEQ ID NO: 3401 - DNA, 55 bp, Artificial Sequence
  Synthetic polynucleotide
gaatttagtaatgaaacggaactgatgtgtaggtgtgagtaacaattaattggat

SEQ ID NO: 3402 - DNA, 55 bp, Artificial Sequence
  Synthetic polynucleotide
cattaaaaatatgagccatgacaaaaccaatggccattaattaattggcaatgct

SEQ ID NO: 3403 - DNA, 55 bp, Artificial Sequence
  Synthetic polynucleotide
tcatagataacagtaccaagttaaaaacaaagggtaaatgggaggtttatgaatt

SEQ ID NO: 3404 - DNA, 55 bp, Artificial Sequence
  Synthetic polynucleotide
cttacttaactcatggccgttataattatttggattagcgccccttttacggaac

SEQ ID NO: 3405 - DNA, 55 bp, Artificial Sequence
  Synthetic polynucleotide
cttgggggcttcattgccatcaaaataaatcgggagtaacttataaatttatctt

SEQ ID NO: 3406 - DNA, 55 bp, Artificial Sequence
  Synthetic polynucleotide
cttgttctattgtcatcgttgtcgttatttcgggtttcaacacgccaaacttgtt

SEQ ID NO: 3407 - DNA, 55 bp, Artificial Sequence
  Synthetic polynucleotide
aagcatgatgtaaggcctgttgaagatttaaggagatggattactgagagatcgt

SEQ ID NO: 3408 - DNA, 55 bp, Artificial Sequence
  Synthetic polynucleotide
aactatcatgacaaaccgagggctataatcagggaccacgtaaaagaatgattgt

SEQ ID NO: 3409 - DNA, 55 bp, Artificial Sequence
  Synthetic polynucleotide
gcattaagttgatgatctcggggagatattgggcatgcacattattagagaattt

SEQ ID NO: 3410 - DNA, 55 bp, Artificial Sequence
  Synthetic polynucleotide
ttcaacgcgactacgtcctaaaatcaaaaaaggcaccattgtcctaccaatcaat

SEQ ID NO: 3411 - DNA, 55 bp, Artificial Sequence
  Synthetic polynucleotide
ggttccaaaaaactaactggagggagtactaggtaatctattggtaaccacatct

SEQ ID NO: 3412 - DNA, 55 bp, Artificial Sequence
  Synthetic polynucleotide
caaacagggtaatttcctgcacccaaaaaaaggcgtttccttttacaaaaactgc

SEQ ID NO: 3413 - DNA, 55 bp, Artificial Sequence
  Synthetic polynucleotide
tttctacctggtttccctgaactcgtatgacggaactatcaacctttcgttattt

SEQ ID NO: 3414 - DNA, 55 bp, Artificial Sequence
  Synthetic polynucleotide
tactaggagaggtttacgatagcccgtactcgggagtttgaaaatttatagttga

SEQ ID NO: 3415 - DNA, 55 bp, Artificial Sequence
  Synthetic polynucleotide
tcttctcgaattgctgctagtgatcaggctgggatagtatgtgataaaaaacgtt

SEQ ID NO: 3416 - DNA, 55 bp, Artificial Sequence
  Synthetic polynucleotide
tgaaaggaaaagatcacaaagaaagtcaggcggacgatattaaaaactagagaca

SEQ ID NO: 3417 - DNA, 55 bp, Artificial Sequence
  Synthetic polynucleotide
gtgttgttagtacgcactagtacaattggttgggtacacggtaataacgtaaaag

SEQ ID NO: 3418 - DNA, 55 bp, Artificial Sequence
  Synthetic polynucleotide
tttcaactggagtactcagagctacggaactggtcagttatatctcttatttcga

SEQ ID NO: 3419 - DNA, 55 bp, Artificial Sequence
  Synthetic polynucleotide
tgacatttgtaccaaacctcttgctatttatgggctccttactacgcctaacctg

SEQ ID NO: 3420 - DNA, 55 bp, Artificial Sequence
  Synthetic polynucleotide
ccagtatgatatcctacgcagggagtttctgggttaagagcgattagttcacttt

SEQ ID NO: 3421 - DNA, 55 bp, Artificial Sequence
  Synthetic polynucleotide
cttatcaacccacttcctcttagaccttctaggtacacgactgctaagaatcctc

SEQ ID NO: 3422 - DNA, 55 bp, Artificial Sequence
  Synthetic polynucleotide
ccgtatatgcaacgctctaggaaaataaaaaggacgagagagacgggctattaag

SEQ ID NO: 3423 - DNA, 55 bp, Artificial Sequence
  Synthetic polynucleotide
catactgaagattccgcacactgcaattcctggataggctagacaaccatcaagt

SEQ ID NO: 3424 - DNA, 55 bp, Artificial Sequence
  Synthetic polynucleotide
cagtaactagtacgctctggtttatgcttggggcagtttgatagtatccacaaat

SEQ ID NO: 3425 - DNA, 55 bp, Artificial Sequence
  Synthetic polynucleotide
gtacaagaatttggttctattgtctgctgttggtcaccatcgttcgacatacgtt

SEQ ID NO: 3426 - DNA, 55 bp, Artificial Sequence
  Synthetic polynucleotide
tgtattgcttaaaagacttgcgcgctgctcgggaaaattgttttagtcggcaagg

SEQ ID NO: 3427 - DNA, 55 bp, Artificial Sequence
  Synthetic polynucleotide
ctgtatatgttctacactgatgctggtcgtaggaaagggtatggactatatacag

SEQ ID NO: 3428 - DNA, 55 bp, Artificial Sequence
  Synthetic polynucleotide
tacaagggcaggagaactcaagcatgacatagggaaccaaaccggtgatttaagt

SEQ ID NO: 3429 - DNA, 55 bp, Artificial Sequence
  Synthetic polynucleotide
tctcatttaacaagtgcgttaaggatcggtcgggacgctgttgatttacaactcg

SEQ ID NO: 3430 - DNA, 55 bp, Artificial Sequence
  Synthetic polynucleotide
tacttcctaaattacacctcctacggtaacaggtcacttccctacgctgaatgct

SEQ ID NO: 3431 - DNA, 55 bp, Artificial Sequence
  Synthetic polynucleotide
aaaaaacaaggagtgccagagacacggtggtggttaagtaaggcttctaagttct

SEQ ID NO: 3432 - DNA, 55 bp, Artificial Sequence
  Synthetic polynucleotide
gtaacctaaagatgaccgagtctacggtgcaggcgagctttgtagttatgttaac

SEQ ID NO: 3433 - DNA, 55 bp, Artificial Sequence
  Synthetic polynucleotide
ataccgggtactgaagcactaaggttcagctggatccttacaaggcatattaaca

SEQ ID NO: 3434 - DNA, 55 bp, Artificial Sequence
  Synthetic polynucleotide
atagaggggtaaatagcgtcccttatttccggggcgctgatactcctaaagcaaa

SEQ ID NO: 3435 - DNA, 55 bp, Artificial Sequence
  Synthetic polynucleotide
tccttttaccagtgggcggggagtgcctctaggagcttatcacgctgacaagtga

SEQ ID NO: 3436 - DNA, 55 bp, Artificial Sequence
  Synthetic polynucleotide
gaccgtcgggttcagtcgtatgtggtaattgggcctgccagagcacgtgaacaaa

SEQ ID NO: 3437 - DNA, 55 bp, Artificial Sequence
  Synthetic polynucleotide
gcacgtgaccccaatgcgtttggccgggtgtggtatcgtcagactccgtcagtaa

SEQ ID NO: 3438 - DNA, 55 bp, Artificial Sequence
  Synthetic polynucleotide
cctgtttagggttctgcatgtatggcctttgggagcgagccacgtaagagcatat

SEQ ID NO: 3439 - DNA, 55 bp, Artificial Sequence
  Synthetic polynucleotide
agcaccgagtctcgaccgcttcaggtgtttaggagagcgataccacgacgggcga

SEQ ID NO: 3440 - DNA, 55 bp, Artificial Sequence
  Synthetic polynucleotide
ctgttgggctcatgttcaccgttcgggccaaggattagtctaccttcgcattacg

SEQ ID NO: 3441 - DNA, 55 bp, Artificial Sequence
  Synthetic polynucleotide
gaataagccttcacggccggccaactaccagggagtaacctctaagtacggggat

SEQ ID NO: 3442 - DNA, 55 bp, Artificial Sequence
  Synthetic polynucleotide
tatacgtgacagggcacctgggccattgtcgggaacatcagtttaaacggacaac

SEQ ID NO: 3443 - DNA, 55 bp, Artificial Sequence
  Synthetic polynucleotide
cgtttaggttcagacccatccggagcagtggggtgacgcactaccatagatcgcc

SEQ ID NO: 3444 - DNA, 55 bp, Artificial Sequence
  Synthetic polynucleotide
tcccgataggaccacccgaccgcacttcgaaggcttgtacaatagcagtggagag

SEQ ID NO: 3445 - DNA, 55 bp, Artificial Sequence
  Synthetic polynucleotide
cggtagggtctgagggcatgatatggacacgggccctgcgccatatttgcttacc

SEQ ID NO: 3446 - DNA, 55 bp, Artificial Sequence
  Synthetic polynucleotide
gcttgaccggagataaccgtggataaaggctgggggcggaaaccaccgacatcgg

SEQ ID NO: 3447 - DNA, 55 bp, Artificial Sequence
  Synthetic polynucleotide
tttccattgtaaattgctgatgaccctggccggggtcaagtgagtccaaacccct

SEQ ID NO: 3448 - DNA, 55 bp, Artificial Sequence
  Synthetic polynucleotide
tttcatggctcaaacacggttacggacgagaggatggaagactaattgagccagg

SEQ ID NO: 3449 - DNA, 55 bp, Artificial Sequence
  Synthetic polynucleotide
ggcctaccacgcgcgacagcctatgcttctgggattcgctatcctgtgcgacggt

SEQ ID NO: 3450 - DNA, 55 bp, Artificial Sequence
  Synthetic polynucleotide
ctacggggctggagtccgggacccctttcagggaacagtcgcgttcgggccggat

SEQ ID NO: 3451 - DNA, 55 bp, Artificial Sequence
  Synthetic polynucleotide
ggcgtcggagtaaacgcgctccagtatttccggcgacagcatgctgccccagcgc

SEQ ID NO: 3452 - DNA, 55 bp, Artificial Sequence
  Synthetic polynucleotide
ccctctcgtcccacttcccattggtttgtctggggcggtcacctcgcgggtgcac

SEQ ID NO: 3453 - DNA, 55 bp, Artificial Sequence
  Synthetic polynucleotide
gcatgagtgtcacgtccatgcttggcacctcggacgtcggaagacggcgcagtct

SEQ ID NO: 3454 - DNA, 55 bp, Artificial Sequence
  Synthetic polynucleotide
caaagatatccctagtcagcacggttaacgtgggggcgttcgcccgcccgggaac

SEQ ID NO: 3455 - DNA, 55 bp, Artificial Sequence
  Synthetic polynucleotide
gcccagcgacagctcacacgctgctaccggcggtatacttcccaccggatgtccc

SEQ ID NO: 3456 - DNA, 55 bp, Artificial Sequence
  Synthetic polynucleotide
atctttcgtgccacagcgttggtgtccccggggccgaaacgagcccacgacacat

SEQ ID NO: 3457 - DNA, 55 bp, Artificial Sequence
  Synthetic polynucleotide
gctggtcagcgactacctacggagggataaaggcccccccgtaccggtatgctga

SEQ ID NO: 3458 - DNA, 55 bp, Artificial Sequence
  Synthetic polynucleotide
tctccactgtcgccgcccccggtacccgagtggccgtttcgatgttcagtggtat

SEQ ID NO: 3459 - DNA, 55 bp, Artificial Sequence
  Synthetic polynucleotide
tcgacgtcagtgtgcgcgttactggaagggtggttcccccacctcccggtccgtc

SEQ ID NO: 3460 - DNA, 55 bp, Artificial Sequence
  Synthetic polynucleotide
aacccagcgagccgcgcgattcttaccagcgggaggttccgtccgttgcgccaac

SEQ ID NO: 3461 - DNA, 55 bp, Artificial Sequence
  Synthetic polynucleotide
cgctggctacctattccggaggaacagggtgggaatttccggttgcggtgggcca

SEQ ID NO: 3462 - DNA, 55 bp, Artificial Sequence
  Synthetic polynucleotide
acggcagtaacaagcgctgtgtatgaacgcgggtgatccctagcgcgacggctcg

SEQ ID NO: 3463 - DNA, 55 bp, Artificial Sequence
  Synthetic polynucleotide
ccggcaggcgtaaaccctaggcctcgacaccggagtcgattctgctaggctggga

SEQ ID NO: 3464 - DNA, 55 bp, Artificial Sequence
  Synthetic polynucleotide
ccatgatcattactagcttattcttaatttaggtagtagcattacaatcttctcg

SEQ ID NO: 3465 - DNA, 55 bp, Artificial Sequence
  Synthetic polynucleotide
tatcctggagtctgacctattaattatttctggtctaatttgtgcttagatcttt

SEQ ID NO: 3466 - DNA, 55 bp, Artificial Sequence
  Synthetic polynucleotide
tgtagcatcagattctccacaaaagtttctaggacagaaaagattaagttttttg

SEQ ID NO: 3467 - DNA, 55 bp, Artificial Sequence
  Synthetic polynucleotide
aacacttataatcattcctttgtcatgatttggagattttgggtgtagtctattc

SEQ ID NO: 3468 - DNA, 55 bp, Artificial Sequence
  Synthetic polynucleotide
ttacatgccgcttaatccactatattaaaccggtattctacattaactatatcaa

SEQ ID NO: 3469 - DNA, 55 bp, Artificial Sequence
  Synthetic polynucleotide
tctttagaaaaatttgcattggtttcaattaggaaattcatacagcaccggtcta

SEQ ID NO: 3470 - DNA, 55 bp, Artificial Sequence
  Synthetic polynucleotide
agagtagactatattacgaaagtgaagaataggagtaaagagctaatgaaacaaa

SEQ ID NO: 3471 - DNA, 55 bp, Artificial Sequence
  Synthetic polynucleotide
tcctcgcaataaaaatcacaagtaaaatacgggaaactgaaaagtattaatcaat

SEQ ID NO: 3472 - DNA, 55 bp, Artificial Sequence
  Synthetic polynucleotide
caacctgagtcaacttcttctttctctgttaggatctttttcataacagaatata

SEQ ID NO: 3473 - DNA, 55 bp, Artificial Sequence
  Synthetic polynucleotide
gagtttaaattaaagacggaacatatgaaaaggagttatgtctacactggaactt

SEQ ID NO: 3474 - DNA, 55 bp, Artificial Sequence
  Synthetic polynucleotide
ttactcttattaagagctataaaaaatggtcggaatataaaaattaaaccattca

SEQ ID NO: 3475 - DNA, 55 bp, Artificial Sequence
  Synthetic polynucleotide
ctatattgtagagtatcagatattaatcattggggctattattaagatatatggg

SEQ ID NO: 3476 - DNA, 55 bp, Artificial Sequence
  Synthetic polynucleotide
agtatattcacagcggcaagataacaacataggacattaaaattctatttcaaac

SEQ ID NO: 3477 - DNA, 55 bp, Artificial Sequence
  Synthetic polynucleotide
atataggctgcaatgccaatagagatgtgaaggcattacttttagaatatgaatt

SEQ ID NO: 3478 - DNA, 55 bp, Artificial Sequence
  Synthetic polynucleotide
aaacaaatgagaatcacagaaggacgaagctgggagataaattaattgtttatta

SEQ ID NO: 3479 - DNA, 55 bp, Artificial Sequence
  Synthetic polynucleotide
cattaccctctgttccctcttactattcctgggctgtagttaattaacatgaaac

SEQ ID NO: 3480 - DNA, 55 bp, Artificial Sequence
  Synthetic polynucleotide
ggaaccatctttaattctctgacccttatttggactcttcaactgcgaattttgg

SEQ ID NO: 3481 - DNA, 55 bp, Artificial Sequence
  Synthetic polynucleotide
gacaccaatagagtcgctatttggataattaggttgttgttggattggtagagga

SEQ ID NO: 3482 - DNA, 55 bp, Artificial Sequence
  Synthetic polynucleotide
catatgtggttctaagctcaaacaaaattccgggacaaggattacaaaacaatgt

SEQ ID NO: 3483 - DNA, 55 bp, Artificial Sequence
  Synthetic polynucleotide
taactgtcgaattcggcatttgtcattgtttggttgaagatcacatctatggcct

SEQ ID NO: 3484 - DNA, 55 bp, Artificial Sequence
  Synthetic polynucleotide
aaggcgttgcgccatgcgatcaatttagcttggttgttatttcaccgaataaatt

SEQ ID NO: 3485 - DNA, 55 bp, Artificial Sequence
  Synthetic polynucleotide
aaaactatgcatgttccgaccagcttcctctggacgctgtttatacttataagaa

SEQ ID NO: 3486 - DNA, 55 bp, Artificial Sequence
  Synthetic polynucleotide
agaattttttaggattctccattgatgattcgggagggaggacattaaagtgttg

SEQ ID NO: 3487 - DNA, 55 bp, Artificial Sequence
  Synthetic polynucleotide
tcagaaaaactgggtaccaaaagcaagaaacggataaccaaatttgcagattttg

SEQ ID NO: 3488 - DNA, 55 bp, Artificial Sequence
  Synthetic polynucleotide
atatacctaaaatcaacgatggtatcgaagtggggtttatgtatgggaacataag

SEQ ID NO: 3489 - DNA, 55 bp, Artificial Sequence
  Synthetic polynucleotide
ttgaactcgagctgttctcggtataatcgtgggagctctcttctattaattgtat

SEQ ID NO: 3490 - DNA, 55 bp, Artificial Sequence
  Synthetic polynucleotide
gataattggaaccatactactggtaaccaaaggcaaaactatatggtaggcgcat

SEQ ID NO: 3491 - DNA, 55 bp, Artificial Sequence
  Synthetic polynucleotide
attgtagatataggagccatggtagtacgctgggttgagaagcgataaaaaactt

SEQ ID NO: 3492 - DNA, 55 bp, Artificial Sequence
  Synthetic polynucleotide
gttaatctgacacgatcccatctacaacgctggacagtagattaaagtttacaat

SEQ ID NO: 3493 - DNA, 55 bp, Artificial Sequence
  Synthetic polynucleotide
ggtcaaaaggatgtgtcaacggaaacgtgatggtagtgaaaactctctatttaca

SEQ ID NO: 3494 - DNA, 55 bp, Artificial Sequence
  Synthetic polynucleotide
tatatcagtaataccgccctgttcctttcacgggatgttcttacctagctcttac

SEQ ID NO: 3495 - DNA, 55 bp, Artificial Sequence
  Synthetic polynucleotide
cttaatttctatgccacgccatatataattcgggcccagacacgcgccaagatat

SEQ ID NO: 3496 - DNA, 55 bp, Artificial Sequence
  Synthetic polynucleotide
gttatgctggatggatctgtgagtgttactgggaactcacttggactggttatat

SEQ ID NO: 3497 - DNA, 55 bp, Artificial Sequence
  Synthetic polynucleotide
ataattctggtaggacctctcatgttatcgggggctggactgtaatccgaagtat

SEQ ID NO: 3498 - DNA, 55 bp, Artificial Sequence
  Synthetic polynucleotide
aaagcgaatggttaagcttgtggaaataaaaggcgcagacgtgaaaacctcctgg

SEQ ID NO: 3499 - DNA, 55 bp, Artificial Sequence
  Synthetic polynucleotide
cgtactggttattaaccaagtggtaaattagggtgtccaaggcgtttctacacca

SEQ ID NO: 3500 - DNA, 55 bp, Artificial Sequence
  Synthetic polynucleotide
gaacacataaggatggctgcaagagtgtcatgggagaacagcgataaataatccg

SEQ ID NO: 3501 - DNA, 55 bp, Artificial Sequence
  Synthetic polynucleotide
aacgataaaccagggcctactcaacgaaatgggaatctcaccgtcactgaacttt

SEQ ID NO: 3502 - DNA, 55 bp, Artificial Sequence
  Synthetic polynucleotide
cttagttataacccgtcacgcgggcgattaaggaacgtgcctctcaacatattaa

SEQ ID NO: 3503 - DNA, 55 bp, Artificial Sequence
  Synthetic polynucleotide
cacagatacggttgctccagggagcgatataggaatttaccagaggtcatttcta

SEQ ID NO: 3504 - DNA, 55 bp, Artificial Sequence
  Synthetic polynucleotide
gtagtttctagggtacccattaccatgatctggcaatcgtacagattgtgcagta

SEQ ID NO: 3505 - DNA, 55 bp, Artificial Sequence
  Synthetic polynucleotide
tgttgatcgatagggacgatctgttgtaagaggtcgacttggtctgtaatacacc

SEQ ID NO: 3506 - DNA, 55 bp, Artificial Sequence
  Synthetic polynucleotide
gttgctagactataggcaacaaaccgacacaggtataatgaagacgccgaggatt

SEQ ID NO: 3507 - DNA, 55 bp, Artificial Sequence
  Synthetic polynucleotide
gaggatctaagagagacccgaataacccgtcggacgaaaataaatacgtttcctg

SEQ ID NO: 3508 - DNA, 55 bp, Artificial Sequence
  Synthetic polynucleotide
agttgcaagaccgggtcagttgaaaaacggaggaagtccaatcattttgtgtata

SEQ ID NO: 3509 - DNA, 55 bp, Artificial Sequence
  Synthetic polynucleotide
tgtgtcggcgggtttgcgctcaaatagtttgggctggtcatcacagatcagacgc

SEQ ID NO: 3510 - DNA, 55 bp, Artificial Sequence
  Synthetic polynucleotide
gaaatcaaccccctaccccttggctttctccggtagttacgctagcgtcaccagc

SEQ ID NO: 3511 - DNA, 55 bp, Artificial Sequence
  Synthetic polynucleotide
tggctgcacttcgtacccgtaacgccttctcgggtgaatacttgcagctgaatag

SEQ ID NO: 3512 - DNA, 55 bp, Artificial Sequence
  Synthetic polynucleotide
cgcggtgtagtttgaccgaaccagaattaatggccggccgacgaagtacgattgc

SEQ ID NO: 3513 - DNA, 55 bp, Artificial Sequence
  Synthetic polynucleotide
cccttcccggagccctcctgattgagatcttggctgatactttgcctagttgacc

SEQ ID NO: 3514 - DNA, 55 bp, Artificial Sequence
  Synthetic polynucleotide
acagtctatgaaacggccccgaggcattatcggtgttggcggatcaggaatacct

SEQ ID NO: 3515 - DNA, 55 bp, Artificial Sequence
  Synthetic polynucleotide
tcatctatcgagaatgccgcctccatcttatggctcgggatgttcgtccacgaac

SEQ ID NO: 3516 - DNA, 55 bp, Artificial Sequence
  Synthetic polynucleotide
ccagaatgacgttcgtcactacagctccctgggtaaatctcccagcgtcgacgaa

SEQ ID NO: 3517 - DNA, 55 bp, Artificial Sequence
  Synthetic polynucleotide
agctaaaattaccggtcgcaggctcgagttgggtacaggtctgatccgctggccc

SEQ ID NO: 3518 - DNA, 55 bp, Artificial Sequence
  Synthetic polynucleotide
atgtattgcaacctatcgcctccacgtgaatggccccgaagagcaggatgaaatt

SEQ ID NO: 3519 - DNA, 55 bp, Artificial Sequence
  Synthetic polynucleotide
tatattcctcagccgtcagaaggtttccaccggggaccgagcagatgaccttttt

SEQ ID NO: 3520 - DNA, 55 bp, Artificial Sequence
  Synthetic polynucleotide
attgctatgatactggcttagagagtcaaagggcgcgttgagccgaatcagtcga

SEQ ID NO: 3521 - DNA, 55 bp, Artificial Sequence
  Synthetic polynucleotide
tcaaacattagtcggccgaaactgacaggtcgggaacttagtcacgaccgttcca

SEQ ID NO: 3522 - DNA, 55 bp, Artificial Sequence
  Synthetic polynucleotide
gtccaaacaacacgctcagattcagaccaaagggctacgggcttgagccgagacg

SEQ ID NO: 3523 - DNA, 55 bp, Artificial Sequence
  Synthetic polynucleotide
ttcagcataagcgactcgcaagaactgggccggcggtctgtcagtcctgcggaaa

SEQ ID NO: 3524 - DNA, 55 bp, Artificial Sequence
  Synthetic polynucleotide
agtacgaggctatgggctcccgcgtcttcagggagacagccggggaagtaagccc

SEQ ID NO: 3525 - DNA, 55 bp, Artificial Sequence
  Synthetic polynucleotide
gcggtccccccggcctcggcgagagtttattgggcgtcaaagtcggttcccgtta

SEQ ID NO: 3526 - DNA, 55 bp, Artificial Sequence
  Synthetic polynucleotide
aggacggatcgccccgccgctggcggccttaggaccttatcatgccctgtcggca

SEQ ID NO: 3527 - DNA, 55 bp, Artificial Sequence
  Synthetic polynucleotide
gcggggctggaaccgtccttctagtaggtttggtgggtaccggccctgagctatc

SEQ ID NO: 3528 - DNA, 55 bp, Artificial Sequence
  Synthetic polynucleotide
ccgagccgcggcgatgccgttccgcctactcggtaacggcaaggaacactaggat

SEQ ID NO: 3529 - DNA, 55 bp, Artificial Sequence
  Synthetic polynucleotide
ggaccgcacagcgcgcctcgctttgctctccggagaatagtgaagcgacctccag

SEQ ID NO: 3530 - DNA, 55 bp, Artificial Sequence
  Synthetic polynucleotide
accccgtcaagtgatcctgccctcgtctacggggtgacgatccatactgccccgg

SEQ ID NO: 3531 - DNA, 55 bp, Artificial Sequence
  Synthetic polynucleotide
gcatcccgcagagcggcgcaccgaaagaatcgggtattcagctggcctggattcc

SEQ ID NO: 3532 - DNA, 55 bp, Artificial Sequence
  Synthetic polynucleotide
cgttctaagtctaacgctgagtatgtggcgggggggtagcgggtccggcgcacca

SEQ ID NO: 3533 - DNA, 55 bp, Artificial Sequence
  Synthetic polynucleotide
ggctgtgaccgcacctcgcgctaaccaagatggcacaccccgtctggcgggggcc

SEQ ID NO: 3534 - DNA, 55 bp, Artificial Sequence
  Synthetic polynucleotide
cgctgtgccgacgatccatgcgatagctgtcgggcatggctaaggggagaagggt

SEQ ID NO: 3535 - DNA, 55 bp, Artificial Sequence
  Synthetic polynucleotide
agacgcgctacaaccgcggctacatatgtccggacgggccctaagccctgccctt

SEQ ID NO: 3536 - DNA, 55 bp, Artificial Sequence
  Synthetic polynucleotide
cctgcgacaggtgaccctctaagttgcgacgggtcagccatggcagcgaagtacc

SEQ ID NO: 3537 - DNA, 55 bp, Artificial Sequence
  Synthetic polynucleotide
ttcagtctcaagcgtgcccgaaatccgggagggcggggcagctcggcgttctttt

SEQ ID NO: 3538 - DNA, 55 bp, Artificial Sequence
  Synthetic polynucleotide
tgtggggaccctggcccacatactcccggcgggaagtttgctcctgtgtccaacg

SEQ ID NO: 3539 - DNA, 55 bp, Artificial Sequence
  Synthetic polynucleotide
caaagggtgtataaaactatttatttaaaagggtaaaattcatcaagcgctagat

SEQ ID NO: 3540 - DNA, 55 bp, Artificial Sequence
  Synthetic polynucleotide
ggaggaatttatttctcttacgtctaatataggattctcactgtacactaatttg

SEQ ID NO: 3541 - DNA, 55 bp, Artificial Sequence
  Synthetic polynucleotide
gaaaagttgtcccattcacatactataaattggcccttctatatacaatatgtta

SEQ ID NO: 3542 - DNA, 55 bp, Artificial Sequence
  Synthetic polynucleotide
atttttcttactagctcatcattgttcttaaggtagtcttctctctcatgtactt

SEQ ID NO: 3543 - DNA, 55 bp, Artificial Sequence
  Synthetic polynucleotide
atgctgaagaatttagcctgtgtaaaattggggtccacaaaacaaaaaaattttt

SEQ ID NO: 3544 - DNA, 55 bp, Artificial Sequence
  Synthetic polynucleotide
gattttgtcaagaattctgttgtgaaattaaggattaagaagatgtggaaactca

SEQ ID NO: 3545 - DNA, 55 bp, Artificial Sequence
  Synthetic polynucleotide
tgttatctacagtcagctagcaagaaaaacaggtttataaagggaacatagaaat

SEQ ID NO: 3546 - DNA, 55 bp, Artificial Sequence
  Synthetic polynucleotide
cgtattgttggtaggactttattaataagaaggtacatatctttaaaataccatt

SEQ ID NO: 3547 - DNA, 55 bp, Artificial Sequence
  Synthetic polynucleotide
agtcatatctaaaacaccacacagtcaaaaaggtacataaaacacttcatctttg

SEQ ID NO: 3548 - DNA, 55 bp, Artificial Sequence
  Synthetic polynucleotide
aaataatcgggaagatcgaaatataaaccggggatagagaataatacacaaagtt

SEQ ID NO: 3549 - DNA, 55 bp, Artificial Sequence
  Synthetic polynucleotide
attgtcacgtaagtcccattagaattagtcgggaaaagtcaaaaattaaaattgc

SEQ ID NO: 3550 - DNA, 55 bp, Artificial Sequence
  Synthetic polynucleotide
acatctgtgttatatacactgtataatgttagggttatacattaaatcatttaag

SEQ ID NO: 3551 - DNA, 55 bp, Artificial Sequence
  Synthetic polynucleotide
tactattctgcacatgctgataataaaggacggcaacatgcttcataaaaattat

SEQ ID NO: 3552 - DNA, 55 bp, Artificial Sequence
  Synthetic polynucleotide
tagctagcagattcgtcaaaaatacctagaaggtaagaaaaaatatactatacgc

SEQ ID NO: 3553 - DNA, 55 bp, Artificial Sequence
  Synthetic polynucleotide
gtaatacaaaatttgacaaaacatatcagatggtaatagaaaaaaaacataatct

SEQ ID NO: 3554 - DNA, 55 bp, Artificial Sequence
  Synthetic polynucleotide
gtgtggctttctctcacgtttaaagttgcttggtcaattctcttttgtgttaata

SEQ ID NO: 3555 - DNA, 55 bp, Artificial Sequence
  Synthetic polynucleotide
aactacaaggcctatacggttgtaatatctaggatccggtgtaaccctctaaaaa

SEQ ID NO: 3556 - DNA, 55 bp, Artificial Sequence
  Synthetic polynucleotide
ttctctattctcgtcgcgcatgtttgttctcggattatttggttgaatccatata

SEQ ID NO: 3557 - DNA, 55 bp, Artificial Sequence
  Synthetic polynucleotide
ttcttaaaacggttagcaacaccataaatgcggaaacgcaatgacacattgaata

SEQ ID NO: 3558 - DNA, 55 bp, Artificial Sequence
  Synthetic polynucleotide
aaacaccataaaagaacagtcgagataaaaagggttatggactcagttcacgtcg

SEQ ID NO: 3559 - DNA, 55 bp, Artificial Sequence
  Synthetic polynucleotide
ttcagaatttctgattcggagaattaaaaaggggtttcgattcaagtcagtggag

SEQ ID NO: 3560 - DNA, 55 bp, Artificial Sequence
  Synthetic polynucleotide
tgcaaaattcaggttgcacagtgttagaattgggtcttcgctccagttttataga

SEQ ID NO: 3561 - DNA, 55 bp, Artificial Sequence
  Synthetic polynucleotide
ttgcgggtgaggtttgccctaaatacgttatggtagcccaataaaaaaaacaaga

SEQ ID NO: 3562 - DNA, 55 bp, Artificial Sequence
  Synthetic polynucleotide
taataacctgggacgactatcatccatcttgggatggtaacattcacactttttg

SEQ ID NO: 3563 - DNA, 55 bp, Artificial Sequence
  Synthetic polynucleotide
taaaacgcatgggagactgacgttatcgattggaagattgttaagacgcatattg

SEQ ID NO: 3564 - DNA, 55 bp, Artificial Sequence
  Synthetic polynucleotide
cgtacgcagcaagagccaactcgtaatgagaggttccaatttctaaactaataat

SEQ ID NO: 3565 - DNA, 55 bp, Artificial Sequence
  Synthetic polynucleotide
agattagctagtgatgcatgacaatcatagcggcgtacacataatttcacgtata

SEQ ID NO: 3566 - DNA, 55 bp, Artificial Sequence
  Synthetic polynucleotide
gtgtattctagaaggtccctctcactccgaaggcctacaaatttaatctttatac

SEQ ID NO: 3567 - DNA, 55 bp, Artificial Sequence
  Synthetic polynucleotide
ttaacaggttttgggaccagattatcatggtggagggaaacagaatcataaatcg

SEQ ID NO: 3568 - DNA, 55 bp, Artificial Sequence
  Synthetic polynucleotide
taatttaagggaagatcagtcttccagaggtggagacattataggaacagatgat

SEQ ID NO: 3569 - DNA, 55 bp, Artificial Sequence
  Synthetic polynucleotide
gttagtttactgggcgcttattgcctttataggttcgctccgttaaccaaatgtg

SEQ ID NO: 3570 - DNA, 55 bp, Artificial Sequence
  Synthetic polynucleotide
ggttagttacaccgcccgcgctagtattctgggcagccgttattataatactttt

SEQ ID NO: 3571 - DNA, 55 bp, Artificial Sequence
  Synthetic polynucleotide
ttttaggcacgtcttaccgttctatatttagggaatcgtcgtaggcgctcacagt

SEQ ID NO: 3572 - DNA, 55 bp, Artificial Sequence
  Synthetic polynucleotide
ctattcttataggcctcattgtacctctttagggtgcagccctactcgaatcaag

SEQ ID NO: 3573 - DNA, 55 bp, Artificial Sequence
  Synthetic polynucleotide
atgtcagatttgcaaacggtgtaagattatggggctgggcgcctaaaagttcttg

SEQ ID NO: 3574 - DNA, 55 bp, Artificial Sequence
  Synthetic polynucleotide
cgtttacagcaaaaggctaaattcataacaagggcacactaaacgattcggtcag

SEQ ID NO: 3575 - DNA, 55 bp, Artificial Sequence
  Synthetic polynucleotide
gatgcggggattgtatcgcaaacaaaagaggggtacactaaattacatgtcccaa

SEQ ID NO: 3576 - DNA, 55 bp, Artificial Sequence
  Synthetic polynucleotide
tcaaacaattatcccacgtttgatctgttagggaccccgtgcatgaccgtactat

SEQ ID NO: 3577 - DNA, 55 bp, Artificial Sequence
  Synthetic polynucleotide
ggaaagatgttttccaccaagtagtgaatcgggtcgactcaaggtcagtgaattg

SEQ ID NO: 3578 - DNA, 55 bp, Artificial Sequence
  Synthetic polynucleotide
gcttataaaggagagaccaatctctcagaggggagagctaaatcaatcacaatac

SEQ ID NO: 3579 - DNA, 55 bp, Artificial Sequence
  Synthetic polynucleotide
ttatccagtttggtttcttgcaaacagcccgggaccaatgcagttgaacatttcc

SEQ ID NO: 3580 - DNA, 55 bp, Artificial Sequence
  Synthetic polynucleotide
tcggcggttttaagacctgcatcgattggggggagtaagtattctgtacaatatg

SEQ ID NO: 3581 - DNA, 55 bp, Artificial Sequence
  Synthetic polynucleotide
cagaaccgcgaaatagctaatgggttccgcaggaagagtgttgtaaattagagtc

SEQ ID NO: 3582 - DNA, 55 bp, Artificial Sequence
  Synthetic polynucleotide
tagcaaaatagtagaacggtacgaccgagggggttgtagcagcgttaaacattca

SEQ ID NO: 3583 - DNA, 55 bp, Artificial Sequence
  Synthetic polynucleotide
ggaaatgtttgagggtccaatgaatcgaggagggtgtcttttattccgattaggc

SEQ ID NO: 3584 - DNA, 55 bp, Artificial Sequence
  Synthetic polynucleotide
ggtttctttggggtcaccctctagttatatggggtgccgttgtttcatgggtgca

SEQ ID NO: 3585 - DNA, 55 bp, Artificial Sequence
  Synthetic polynucleotide
gaatacctgcagtgggctttggccgattctaggaggtaggagttcgatgaatatg

SEQ ID NO: 3586 - DNA, 55 bp, Artificial Sequence
  Synthetic polynucleotide
ggcacactccgcttctctgtttctctcttttggggtcgccgctcttcagtaggcg

SEQ ID NO: 3587 - DNA, 55 bp, Artificial Sequence
  Synthetic polynucleotide
ctataattcaggtaccctgtcagactttagtggccccctagcttacgcgccaggg

SEQ ID NO: 3588 - DNA, 55 bp, Artificial Sequence
  Synthetic polynucleotide
tactcttctatggtgtcggtgttcttcttaaggctggggggtcacccttggcgag

SEQ ID NO: 3589 - DNA, 55 bp, Artificial Sequence
  Synthetic polynucleotide
gaccgcgcagatcggtctcagagatttaatcggacgaattgaaacagcacgatcc

SEQ ID NO: 3590 - DNA, 55 bp, Artificial Sequence
  Synthetic polynucleotide
cttatagatggcccgccgaccctgatcctacggctatataccaaagtgaatcaat

SEQ ID NO: 3591 - DNA, 55 bp, Artificial Sequence
  Synthetic polynucleotide
ctccatttgggtatcactcgataatcgttgtggtcaacataccgtatggtctcgg

SEQ ID NO: 3592 - DNA, 55 bp, Artificial Sequence
  Synthetic polynucleotide
gggcacttagcaggtgctgatcgagctccccggtaaactgagtaagccgcgttac

SEQ ID NO: 3593 - DNA, 55 bp, Artificial Sequence
  Synthetic polynucleotide
tagtgtgtcagctgcccagagtataccctgtggaagaggtcaggtggtcgacctt

SEQ ID NO: 3594 - DNA, 55 bp, Artificial Sequence
  Synthetic polynucleotide
cctgtaagcgtcttcgcgaaccacaaaggacggctcctccaaccgcctgtcgaac

SEQ ID NO: 3595 - DNA, 55 bp, Artificial Sequence
  Synthetic polynucleotide
atttgtgcgcactctgccaattcgacggggtggcatgagctatccatggtcatcc

SEQ ID NO: 3596 - DNA, 55 bp, Artificial Sequence
  Synthetic polynucleotide
aatgtcggatcgcccacaggactgtaacgatggccctatcatggctaggacgagt

SEQ ID NO: 3597 - DNA, 55 bp, Artificial Sequence
  Synthetic polynucleotide
cccacactcaaagcgtcgtcagtatacggccggctgcgtgtctagagttattcgc

SEQ ID NO: 3598 - DNA, 55 bp, Artificial Sequence
  Synthetic polynucleotide
gaaaaaatcgcgggtacagacttgatacgccggcgggttctgaattcgagactta

SEQ ID NO: 3599 - DNA, 55 bp, Artificial Sequence
  Synthetic polynucleotide
gccccgccgcactcaccttgagcttgctttcggtcacaggcccgacctcacctgg

SEQ ID NO: 3600 - DNA, 55 bp, Artificial Sequence
  Synthetic polynucleotide
agtgtggaacccaaggcggtaacgtattcctgggggcaaacatgcggccctggcg

SEQ ID NO: 3601 - DNA, 55 bp, Artificial Sequence
  Synthetic polynucleotide
ggccagcagtgcgatccggtagcttaattttggccgcatccggcagctggcgagc

SEQ ID NO: 3602 - DNA, 55 bp, Artificial Sequence
  Synthetic polynucleotide
gccgttggcgtggagccgcttagcattgttcggttgggctagtcgccggccgatg

SEQ ID NO: 3603 - DNA, 55 bp, Artificial Sequence
  Synthetic polynucleotide
ggtgggcgcctggtgccgtttgattgccctagggggtccgccatgcgcttcctta

SEQ ID NO: 3604 - DNA, 55 bp, Artificial Sequence
  Synthetic polynucleotide
accgttctcgtcgcgaccgcgaacaagtctcggatccccccagacaacctctggg

SEQ ID NO: 3605 - DNA, 55 bp, Artificial Sequence
  Synthetic polynucleotide
ggaactagcaagggctctccattccaaaacgggcgtggcgtgatccccgcgtggc

SEQ ID NO: 3606 - DNA, 55 bp, Artificial Sequence
  Synthetic polynucleotide
tctagcccgcgtgacgccgcccagctcgttgggactaacctgccttgagagcggc

SEQ ID NO: 3607 - DNA, 55 bp, Artificial Sequence
  Synthetic polynucleotide
cctccacgagtgaggcccggctgcttacaaggggggttttgaggcgaaggcaaag

SEQ ID NO: 3608 - DNA, 55 bp, Artificial Sequence
  Synthetic polynucleotide
aaacaggtggccccacctaccagccagaaatgggctgacccgcccattggtcccc

SEQ ID NO: 3609 - DNA, 55 bp, Artificial Sequence
  Synthetic polynucleotide
acgatacacgccactgcacgccaaccggagtggctgctggcgtgtctgcggccgg

SEQ ID NO: 3610 - DNA, 55 bp, Artificial Sequence
  Synthetic polynucleotide
ttccctcgcacgtcgaccgtgtgtatgggcgggaagacgtacagggggcggttac

SEQ ID NO: 3611 - DNA, 55 bp, Artificial Sequence
  Synthetic polynucleotide
ccctaccgcggagtggccccttctcaaagatggcgcgcccgtaccaggtctcatt

SEQ ID NO: 3612 - DNA, 55 bp, Artificial Sequence
  Synthetic polynucleotide
gagtcacggaggagcacttcagaaccccgggggggtgccgtaggcctaggcgccg

SEQ ID NO: 3613 - DNA, 55 bp, Artificial Sequence
  Synthetic polynucleotide
atcgcgagctccgagtctctcatgcacagagggttccgtcaacgtcccgtcgccg

SEQ ID NO: 3614 - DNA, 55 bp, Artificial Sequence
  Synthetic polynucleotide
atttagaccgatttaacgggatttatatttcgggatttggtttccacattataaa

SEQ ID NO: 3615 - DNA, 55 bp, Artificial Sequence
  Synthetic polynucleotide
cattattttgtaacaacaggaacaataaaaaggaacacaacatagaactccaaca

SEQ ID NO: 3616 - DNA, 55 bp, Artificial Sequence
  Synthetic polynucleotide
taattactctttaattctatatggtattaatggtataatttatatatcactcgca

SEQ ID NO: 3617 - DNA, 55 bp, Artificial Sequence
  Synthetic polynucleotide
tatttagagtttaaaactgggcagttaaggaggcagttacagtactaaaattaat

SEQ ID NO: 3618 - DNA, 55 bp, Artificial Sequence
  Synthetic polynucleotide
aatttcaagtttaaaacataaaggaaataaaggcgcacgaaagaataaatgcaag

SEQ ID NO: 3619 - DNA, 55 bp, Artificial Sequence
  Synthetic polynucleotide
ttaaaaagagatagtgcatataaaggattaaggattaagatgaagtaaggggtca

SEQ ID NO: 3620 - DNA, 55 bp, Artificial Sequence
  Synthetic polynucleotide
cattgtaaatttaatacgtagtttggtgtatggtatgtaaaatttgtgtgtgttt

SEQ ID NO: 3621 - DNA, 55 bp, Artificial Sequence
  Synthetic polynucleotide
aaatataaaaagtcatctgagaaagggtaaaggatacagtgggtcgaatttatac

SEQ ID NO: 3622 - DNA, 55 bp, Artificial Sequence
  Synthetic polynucleotide
caagtttatgatatatccaggggacgagtaggggatatattttcttgtattataa

SEQ ID NO: 3623 - DNA, 55 bp, Artificial Sequence
  Synthetic polynucleotide
gttaatgatatgtacacagaatcgggggtggggaattattaagaaattcattata

SEQ ID NO: 3624 - DNA, 55 bp, Artificial Sequence
  Synthetic polynucleotide
ttagagaaaacgttgtcaaagaagaatgaatgggtcaagttggataaagatataa

SEQ ID NO: 3625 - DNA, 55 bp, Artificial Sequence
  Synthetic polynucleotide
attattattcgagagtcgtgcattgtgtgtgggtgatatcgtgtaataattttat

SEQ ID NO: 3626 - DNA, 55 bp, Artificial Sequence
  Synthetic polynucleotide
tataaaaagtgaataccagtaaaggacaaagggtaggataaagtgtatacttcaa

SEQ ID NO: 3627 - DNA, 55 bp, Artificial Sequence
  Synthetic polynucleotide
tattatatagctaaagcggataaatgacggcggataagattgatgataattattc

SEQ ID NO: 3628 - DNA, 55 bp, Artificial Sequence
  Synthetic polynucleotide
ataagtgatgtaaaaacattataaacgaacgggcataaaaaaactactacgagcg

SEQ ID NO: 3629 - DNA, 55 bp, Artificial Sequence
  Synthetic polynucleotide
ctaattggaggatgttcaattgggatatttggggggccaaatccttcaaatttac

SEQ ID NO: 3630 - DNA, 55 bp, Artificial Sequence
  Synthetic polynucleotide
tacgtggattaaagttcgttggtcggttcttggtcgtaatgttatgaacaatgtc

SEQ ID NO: 3631 - DNA, 55 bp, Artificial Sequence
  Synthetic polynucleotide
tcctccttgtcatatgcagctggggtatatgggtattaatggtacctatctaaat

SEQ ID NO: 3632 - DNA, 55 bp, Artificial Sequence
  Synthetic polynucleotide
ataatttaattgggttcgtatagtgggtgtggggaaattgctaaccctgtatacc

SEQ ID NO: 3633 - DNA, 55 bp, Artificial Sequence
  Synthetic polynucleotide
tatattagttatccgtcctgttgggatttggggtgggtaagtctagttctaacat

SEQ ID NO: 3634 - DNA, 55 bp, Artificial Sequence
  Synthetic polynucleotide
accactttagtcgtaacgaaggggtatccagggtatatatgaaccggttaaattt

SEQ ID NO: 3635 - DNA, 55 bp, Artificial Sequence
  Synthetic polynucleotide
ctatttctattacattcttggggagagtattggagataaatcaactgggataagt

SEQ ID NO: 3636 - DNA, 55 bp, Artificial Sequence
  Synthetic polynucleotide
ttattaaagttaaattcagagaatgggaatggggctaagtaggaccgcgatgtca

SEQ ID NO: 3637 - DNA, 55 bp, Artificial Sequence
  Synthetic polynucleotide
ttcaatacatcggaatccatatggggccattggggattcaaggtttttgaaagtt

SEQ ID NO: 3638 - DNA, 55 bp, Artificial Sequence
  Synthetic polynucleotide
gttatgtcggataggccttgaaggataggatggaacaagctgtagtgtataaaaa

SEQ ID NO: 3639 - DNA, 55 bp, Artificial Sequence
  Synthetic polynucleotide
gattaataagcacatccgcgatacaagacaaggagagctcaagcaaatatagact

SEQ ID NO: 3640 - DNA, 55 bp, Artificial Sequence
  Synthetic polynucleotide
gtatctttagtagaagccgcaagatggagatggatagatttttggaaaggctatc

SEQ ID NO: 3641 - DNA, 55 bp, Artificial Sequence
  Synthetic polynucleotide
aagcataaagagtttgcgaggtttacagggaggttaagtttttagaaatgcatac

SEQ ID NO: 3642 - DNA, 55 bp, Artificial Sequence
  Synthetic polynucleotide
tcgacattttttaggtcgacggaaacgagacgggaaaatctctaaattcactaca

SEQ ID NO: 3643 - DNA, 55 bp, Artificial Sequence
  Synthetic polynucleotide
aaatgtgaatatcgcgcataataggctggcaggtcgcgcattagaaataaaagat

SEQ ID NO: 3644 - DNA, 55 bp, Artificial Sequence
  Synthetic polynucleotide
tttagtagctgtagggctatgctgggctctggggtcgtaatcaagaatacaaatg

SEQ ID NO: 3645 - DNA, 55 bp, Artificial Sequence
  Synthetic polynucleotide
atactcataccgggatctgggcaaatttctggggaaacgaatttacgctcatgtc

SEQ ID NO: 3646 - DNA, 55 bp, Artificial Sequence
  Synthetic polynucleotide
cggatttactaattctccaatggggctttggggctctgatgcgctatctattcat

SEQ ID NO: 3647 - DNA, 55 bp, Artificial Sequence
  Synthetic polynucleotide
cttacttagctacaatctacgtggggaattgggaacctataaaggggatgtcagt

SEQ ID NO: 3648 - DNA, 55 bp, Artificial Sequence
  Synthetic polynucleotide
aaatgaaacctaaacgctgggggatctatttgggatcctgggtaagtgtgctata

SEQ ID NO: 3649 - DNA, 55 bp, Artificial Sequence
  Synthetic polynucleotide
cataacataagggactcttcttgcttgtcttggggcgaaacttgagcaatcaagt

SEQ ID NO: 3650 - DNA, 55 bp, Artificial Sequence
  Synthetic polynucleotide
tcctatgattcaattactgtggggagcacatgggaggttcaagatattggcgagt

SEQ ID NO: 3651 - DNA, 55 bp, Artificial Sequence
  Synthetic polynucleotide
tagaggctcatggtttccctcgtgggtgggtggcatttaaattaaggttaatagc

SEQ ID NO: 3652 - DNA, 55 bp, Artificial Sequence
  Synthetic polynucleotide
acctaactagcctgaacgggcatattgacggggatatatgctttagcattctgca

SEQ ID NO: 3653 - DNA, 55 bp, Artificial Sequence
  Synthetic polynucleotide
ttggataatgtggcgacgcaacaggtgaacagggagtggctcataatatgatctt

SEQ ID NO: 3654 - DNA, 55 bp, Artificial Sequence
  Synthetic polynucleotide
atatggggcttaggttccctatcgtggtgtgggactctcattcttaattaaagtc

SEQ ID NO: 3655 - DNA, 55 bp, Artificial Sequence
  Synthetic polynucleotide
cacttaacaaaacgggctgagaaagatgaaaggaatagccatgagtgggctagag

SEQ ID NO: 3656 - DNA, 55 bp, Artificial Sequence
  Synthetic polynucleotide
aggcgaataatacggacggctaagaacagacggctaactacgtaaaaaagtctat

SEQ ID NO: 3657 - DNA, 55 bp, Artificial Sequence
  Synthetic polynucleotide
aaatgcacatgacatcctggactggaccactggtaacttggtgactattacagat

SEQ ID NO: 3658 - DNA, 55 bp, Artificial Sequence
  Synthetic polynucleotide
cgttctcggataaacactttagcacggcgggggataacagaagatactagctata

SEQ ID NO: 3659 - DNA, 55 bp, Artificial Sequence
  Synthetic polynucleotide
tcttccctgacggcgacggagggcactcctgggcacaagtgatgaagcggaaaaa

SEQ ID NO: 3660 - DNA, 55 bp, Artificial Sequence
  Synthetic polynucleotide
ggactggtcggtcggtcgggggcataaatggggccgtaatgtcgacgtactctgt

SEQ ID NO: 3661 - DNA, 55 bp, Artificial Sequence
  Synthetic polynucleotide
gatcaattttggaggtcggcgggcctgcctggggtggataagcaaaattactgcg

SEQ ID NO: 3662 - DNA, 55 bp, Artificial Sequence
  Synthetic polynucleotide
aattgaagattggtcccgggtagggcgatttgggctcaacggtgcgcacggaacc

SEQ ID NO: 3663 - DNA, 55 bp, Artificial Sequence
  Synthetic polynucleotide
tctctcgaggtaatctctgccacgggttaccgggtaatcatcctggccccatgtg

SEQ ID NO: 3664 - DNA, 55 bp, Artificial Sequence
  Synthetic polynucleotide
aaggcctggctattaccgagaagggccttcgggcgatacaggggctataccaata

SEQ ID NO: 3665 - DNA, 55 bp, Artificial Sequence
  Synthetic polynucleotide
aggaattatcaatgggcgtcaaccaggctcaggcccgttgccacaggcacgcgta

SEQ ID NO: 3666 - DNA, 55 bp, Artificial Sequence
  Synthetic polynucleotide
tttatgttcgtgctaacgtcccaagctcccaggtacgtccccgagcccgagtggg

SEQ ID NO: 3667 - DNA, 55 bp, Artificial Sequence
  Synthetic polynucleotide
cgttttacagaatcctcttcggggccatgggggtcatggtaaaaagtggtcctct

SEQ ID NO: 3668 - DNA, 55 bp, Artificial Sequence
  Synthetic polynucleotide
tgggcaagggctagcacgtcggcgacagaaaggcgaatacgattacgttaggaat

SEQ ID NO: 3669 - DNA, 55 bp, Artificial Sequence
  Synthetic polynucleotide
cgtttaaatttaaggacaccatgttggagttgggcaagggtctcgcccaggttga

SEQ ID NO: 3670 - DNA, 55 bp, Artificial Sequence
  Synthetic polynucleotide
gcacgcggcgtaaagcctaagatacgcgcgcggccatgtaaccgtaccgctttct

SEQ ID NO: 3671 - DNA, 55 bp, Artificial Sequence
  Synthetic polynucleotide
aatgaagaggactactcaagccatgagagccgggaggatcgataaatggggagta

SEQ ID NO: 3672 - DNA, 55 bp, Artificial Sequence
  Synthetic polynucleotide
cgcggcaactatagacccacattcgcgagcggggcagcaatcgccgatttgattg

SEQ ID NO: 3673 - DNA, 55 bp, Artificial Sequence
  Synthetic polynucleotide
aaacaggacaagtcggcacgaagatcacgaagggggtcggtttcaggaggtcacg

SEQ ID NO: 3674 - DNA, 55 bp, Artificial Sequence
  Synthetic polynucleotide
ccctgcgttctgtcagcccgggtcatttccgggcccttccagcggccaggtgcta

SEQ ID NO: 3675 - DNA, 55 bp, Artificial Sequence
  Synthetic polynucleotide
atgaagggcgggcggccgcgccgagcgcgagggctagatagacgactgtcatggg

SEQ ID NO: 3676 - DNA, 55 bp, Artificial Sequence
  Synthetic polynucleotide
acgcgaccgtgacgggctgccgggcctttggggccgccagagagttgtaacctac

SEQ ID NO: 3677 - DNA, 55 bp, Artificial Sequence
  Synthetic polynucleotide
ctcgagtacagcgtggctaacgcggggtatggggcgaccccgaatgtccggcaac

SEQ ID NO: 3678 - DNA, 55 bp, Artificial Sequence
  Synthetic polynucleotide
gcgcagcagagatcgacctgtctcgggtctcggcggtgtgcctctacaagagggc

SEQ ID NO: 3679 - DNA, 55 bp, Artificial Sequence
  Synthetic polynucleotide
cgtcgcggatacgatccccccacctagtctaggcacctcatcagaccgagctcga

SEQ ID NO: 3680 - DNA, 55 bp, Artificial Sequence
  Synthetic polynucleotide
cccctgacgccagtgtcgttcctccctcccgggacaatctttcagcatagggtcc

SEQ ID NO: 3681 - DNA, 55 bp, Artificial Sequence
  Synthetic polynucleotide
ctttgtcgtgcccaaccagcaccaggggctagggggacgatcgtagcgcgtatga

SEQ ID NO: 3682 - DNA, 55 bp, Artificial Sequence
  Synthetic polynucleotide
actgagtatagggacgcggcacaaacaaacagggtacgccgcgccatggtggcgc

SEQ ID NO: 3683 - DNA, 55 bp, Artificial Sequence
  Synthetic polynucleotide
agcttgcgcgtagaggcgtgcagacgcagacggtcgctgcatatgtgaggccctg

SEQ ID NO: 3684 - DNA, 55 bp, Artificial Sequence
  Synthetic polynucleotide
tccccaggtatgaacgcaacggcgcgaccgcggacattgggcgttttcgaccctt

SEQ ID NO: 3685 - DNA, 55 bp, Artificial Sequence
  Synthetic polynucleotide
ccctcgcacggataggcttgtggcgccgggcggtgcttacgcagccctcataacc

SEQ ID NO: 3686 - DNA, 55 bp, Artificial Sequence
  Synthetic polynucleotide
ccgacgcgtgcgttgactatggtacgccgccggcccggccgctcgagagcgctag

SEQ ID NO: 3687 - DNA, 55 bp, Artificial Sequence
  Synthetic polynucleotide
ccactaactaagctcccggacacggtgaggtgggccccaagcgacggcctctcgg

SEQ ID NO: 3688 - DNA, 55 bp, Artificial Sequence
  Synthetic polynucleotide
cgggtggaaacagaggcttcggttgccagccggcggaggaggccacatacgtcac

SEQ ID NO: 3689 - DNA, 55 bp, Artificial Sequence
  Synthetic polynucleotide
taataggatggttgggctggtaattaaaaatgggtaattgtttatgcagttttga

SEQ ID NO: 3690 - DNA, 55 bp, Artificial Sequence
  Synthetic polynucleotide
aataccggtgatttgactgggtaaattattgggttttaatggctgtttaataaag

SEQ ID NO: 3691 - DNA, 55 bp, Artificial Sequence
  Synthetic polynucleotide
tagcagatatttataacaatataataaataaggattatttaaagtatattatttt

SEQ ID NO: 3692 - DNA, 55 bp, Artificial Sequence
  Synthetic polynucleotide
tattatagagctaactctttgctggttctttggcttatagggttatttgatattt

SEQ ID NO: 3693 - DNA, 55 bp, Artificial Sequence
  Synthetic polynucleotide
atttcatagtataaaacgggaggaaaaaaaaggaatcaaagacagctaggtttaa

SEQ ID NO: 3694 - DNA, 55 bp, Artificial Sequence
  Synthetic polynucleotide
ttcatctttttattacctagttggatgtttgggttggttttatgaaggattaaat

SEQ ID NO: 3695 - DNA, 55 bp, Artificial Sequence
  Synthetic polynucleotide
gaattcagagtttgatctataagaaataagaggagctaatctgtataaaagaagc

SEQ ID NO: 3696 - DNA, 55 bp, Artificial Sequence
  Synthetic polynucleotide
aaatcaaaattttaaactagtgcagggacggggtttttttagacccattttaaat

SEQ ID NO: 3697 - DNA, 55 bp, Artificial Sequence
  Synthetic polynucleotide
ctaatgaagttaaattcagtgaaggtaagtaggtcatattgtaagtgtattaaac

SEQ ID NO: 3698 - DNA, 55 bp, Artificial Sequence
  Synthetic polynucleotide
aattaactgatattaactaaaagagtgaagcggtgagttaagattggagttggta

SEQ ID NO: 3699 - DNA, 55 bp, Artificial Sequence
  Synthetic polynucleotide
cctttgaagtaaaagactaaaaggttaggaaggaaaaataacatatgttcaagaa

SEQ ID NO: 3700 - DNA, 55 bp, Artificial Sequence
  Synthetic polynucleotide
atttcaggattcgtatctaaagaaaagaagcggtactaaaagacttaagatctaa

SEQ ID NO: 3701 - DNA, 55 bp, Artificial Sequence
  Synthetic polynucleotide
ctctgtgatcaagttacaaaaggggattgctgggaaaaaaagaattttaacataa

SEQ ID NO: 3702 - DNA, 55 bp, Artificial Sequence
  Synthetic polynucleotide
aaatggtatatatgatcaatagaaaggagagggtttaaaaaaaagagtattcata

SEQ ID NO: 3703 - DNA, 55 bp, Artificial Sequence
  Synthetic polynucleotide
agagattcttttatatcttatagaaaacgaaggaaaaaaaagctcaatagaaaac

SEQ ID NO: 3704 - DNA, 55 bp, Artificial Sequence
  Synthetic polynucleotide
tcctatttctctgcttcagactcttattcttggactcatgtattctttttagcag

SEQ ID NO: 3705 - DNA, 55 bp, Artificial Sequence
  Synthetic polynucleotide
cgaaggtatattgaatcggggagtaattagggggttctactattattagcactag

SEQ ID NO: 3706 - DNA, 55 bp, Artificial Sequence
  Synthetic polynucleotide
cattcgggaattcaatccgggcatttattatggggcacattattatactttctct

SEQ ID NO: 3707 - DNA, 55 bp, Artificial Sequence
  Synthetic polynucleotide
attgagaacgccaactcggtttccacatcacggtcgaccattatacttaattata

SEQ ID NO: 3708 - DNA, 55 bp, Artificial Sequence
  Synthetic polynucleotide
gtatgagagtcgacttcggggggagagttttgggatggaagttaaaatttattaa

SEQ ID NO: 3709 - DNA, 55 bp, Artificial Sequence
  Synthetic polynucleotide
gtttacagatgtttatctggaagtaagttaagggtttgtgagtaaaagaggtggc

SEQ ID NO: 3710 - DNA, 55 bp, Artificial Sequence
  Synthetic polynucleotide
atccatagtatgcagacatataaggggattgggtagaaccttaaagggtacttgt

SEQ ID NO: 3711 - DNA, 55 bp, Artificial Sequence
  Synthetic polynucleotide
ttactatgtctatcatcctaatggccctcccggccatacaattaatctttattga

SEQ ID NO: 3712 - DNA, 55 bp, Artificial Sequence
  Synthetic polynucleotide
aaattattccgtcatacaggacgtggttgggggccaatgtacatgtattatcaat

SEQ ID NO: 3713 - DNA, 55 bp, Artificial Sequence
  Synthetic polynucleotide
tttataagtattattgcctggtgtgtggtgaggcggtgagtctataacataacta

SEQ ID NO: 3714 - DNA, 55 bp, Artificial Sequence
  Synthetic polynucleotide
gatattttgtgggatccggaagtcaaggaagggggttttttaacaacaactgata

SEQ ID NO: 3715 - DNA, 55 bp, Artificial Sequence
  Synthetic polynucleotide
attacagttatcttgacaggggtactgcaagggtcaggttataaactgtaaacga

SEQ ID NO: 3716 - DNA, 55 bp, Artificial Sequence
  Synthetic polynucleotide
acgttttaccatggaacaccacacaaccactggctttctttgattcacacattta

SEQ ID NO: 3717 - DNA, 55 bp, Artificial Sequence
  Synthetic polynucleotide
tgatgactgtgattcgcaagggtattagggaggtagccattatattgtttatgtt

SEQ ID NO: 3718 - DNA, 55 bp, Artificial Sequence
  Synthetic polynucleotide
atcgtctagggttatgcaaggcattggaggtggttaatatctcggaaacattaat

SEQ ID NO: 3719 - DNA, 55 bp, Artificial Sequence
  Synthetic polynucleotide
aggaatcataatcctgctgacagctcttctaggcctaatcttcattaggctcacg

SEQ ID NO: 3720 - DNA, 55 bp, Artificial Sequence
  Synthetic polynucleotide
atatttatgaattggtcgtgggccagttctgggggcatattttccgtgacaaaca

SEQ ID NO: 3721 - DNA, 55 bp, Artificial Sequence
  Synthetic polynucleotide
tctatcaattacgggccgctggtttagtctgggttcgagaatgtttgaaaaaatg

SEQ ID NO: 3722 - DNA, 55 bp, Artificial Sequence
  Synthetic polynucleotide
gaccaaaacggtatcacggtatcgtatttgggggacgtatactcactatagcaga

SEQ ID NO: 3723 - DNA, 55 bp, Artificial Sequence
  Synthetic polynucleotide
aataaacgtgttggttccgcaagagggtctgggcgtataaggagtcaaacattag

SEQ ID NO: 3724 - DNA, 55 bp, Artificial Sequence
  Synthetic polynucleotide
gttcgttctggttaacccagatcttgggctgggtgggggtatatttataagtgaa

SEQ ID NO: 3725 - DNA, 55 bp, Artificial Sequence
  Synthetic polynucleotide
aagattcttgatagaccggcgctaggtacacggcataagacgcgctaaaaataag

SEQ ID NO: 3726 - DNA, 55 bp, Artificial Sequence
  Synthetic polynucleotide
tatcgagcatgaattccacgtggttggttgtgggatgaatgaccaaggcttagtt

SEQ ID NO: 3727 - DNA, 55 bp, Artificial Sequence
  Synthetic polynucleotide
aacagaattttgacagcatgggaagagatgggggatcggatcaagaattcccgaa

SEQ ID NO: 3728 - DNA, 55 bp, Artificial Sequence
  Synthetic polynucleotide
ggtttgggattgtccgcgtggaaaagtgagtgggatcatgtacgtttttaatctc

SEQ ID NO: 3729 - DNA, 55 bp, Artificial Sequence
  Synthetic polynucleotide
attataaagcgttacaccctcaaggtgagcgggtgtttggtctgcttattcatga

SEQ ID NO: 3730 - DNA, 55 bp, Artificial Sequence
  Synthetic polynucleotide
tgaatttagtttgcgcctttggaggagtgaaggtaagcgcttttgaacaaagtgt

SEQ ID NO: 3731 - DNA, 55 bp, Artificial Sequence
  Synthetic polynucleotide
gtataacgagtttgttcaggagaagatggatggcacaggttaagtgagattgcgt

SEQ ID NO: 3732 - DNA, 55 bp, Artificial Sequence
  Synthetic polynucleotide
ctatagatacataggtcataagacccgcaccggaatttacccctcagcctgaaaa

SEQ ID NO: 3733 - DNA, 55 bp, Artificial Sequence
  Synthetic polynucleotide
atctaagatatttgatctgagtgtcagagatggagtcaggaaagtcaatccgcga

SEQ ID NO: 3734 - DNA, 55 bp, Artificial Sequence
  Synthetic polynucleotide
gagaagtgcggctcggctggtctgctgtctgggctgcatgttaattgtgaagagc

SEQ ID NO: 3735 - DNA, 55 bp, Artificial Sequence
  Synthetic polynucleotide
cacgtgggggtttcgtcgtgggggtattcacgggtgttccgactgaaaccagagc

SEQ ID NO: 3736 - DNA, 55 bp, Artificial Sequence
  Synthetic polynucleotide
gttaatcttcgctgggcgattacggcaacgcggtatcgtaccacgcagcaaatat

SEQ ID NO: 3737 - DNA, 55 bp, Artificial Sequence
  Synthetic polynucleotide
ctgacgtggagcgcgcccaacagggctgctaggactccacaagttgtggattacg

SEQ ID NO: 3738 - DNA, 55 bp, Artificial Sequence
  Synthetic polynucleotide
actgaatagggctggcccgaccgtagggctaggagcacacgttgagtttactgag

SEQ ID NO: 3739 - DNA, 55 bp, Artificial Sequence
  Synthetic polynucleotide
ttaaggcaatagacaccccacaggggggccgggtttctggtcttgcggcaatcgc

SEQ ID NO: 3740 - DNA, 55 bp, Artificial Sequence
  Synthetic polynucleotide
aaccatgcaccttcgcccaccctttccgcctgggcattgtagatcctaatgtccc

SEQ ID NO: 3741 - DNA, 55 bp, Artificial Sequence
  Synthetic polynucleotide
ggcttatctccagcgaccttccctatcccctggaagcctgatacacggttgaaaa

SEQ ID NO: 3742 - DNA, 55 bp, Artificial Sequence
  Synthetic polynucleotide
attacgatatgagaaacagggggtatggaaggggaacttacccaaatacaggggg

SEQ ID NO: 3743 - DNA, 55 bp, Artificial Sequence
  Synthetic polynucleotide
agtgaatacctatccccagcggtgtgtcggcggaatggggtcgttatgacgagaa

SEQ ID NO: 3744 - DNA, 55 bp, Artificial Sequence
  Synthetic polynucleotide
gaacacgtcacatacccccggagatcgaaccggcccttcgctttaatagaacggt

SEQ ID NO: 3745 - DNA, 55 bp, Artificial Sequence
  Synthetic polynucleotide
gcgggatccgtctctgctgggacgcccggatggtaccagaaggcgtgattaacta

SEQ ID NO: 3746 - DNA, 55 bp, Artificial Sequence
  Synthetic polynucleotide
ccttctttcaagagggcgctatagcaggggcggcgagatagctcacctggttggt

SEQ ID NO: 3747 - DNA, 55 bp, Artificial Sequence
  Synthetic polynucleotide
tgctgagacataccgactgtcctgcaccaccggattacctttcccgaggacgagt

SEQ ID NO: 3748 - DNA, 55 bp, Artificial Sequence
  Synthetic polynucleotide
tagtccacactggacacaagtatgcgggggaggcgttgacctgttctcgtcgatc

SEQ ID NO: 3749 - DNA, 55 bp, Artificial Sequence
  Synthetic polynucleotide
atttaggagggcccgtcgggtgcgctcgctgggtggtgcggggcagtaccaagga

SEQ ID NO: 3750 - DNA, 55 bp, Artificial Sequence
  Synthetic polynucleotide
cgggtgctagtggcttccggcggctggtttgggcaggtaacagaaggagggtccc

SEQ ID NO: 3751 - DNA, 55 bp, Artificial Sequence
  Synthetic polynucleotide
aagcggggtcgctgccccggttggcttccatggtggcccggcgacccacggttta

SEQ ID NO: 3752 - DNA, 55 bp, Artificial Sequence
  Synthetic polynucleotide
cggccggagttcgtgacggctggtgggtgcgggcgatcagtcgtaatcgacggcc

SEQ ID NO: 3753 - DNA, 55 bp, Artificial Sequence
  Synthetic polynucleotide
caggtgctccaggggccctggccctgcctagggccgatgcagaacatccgaaatc

SEQ ID NO: 3754 - DNA, 55 bp, Artificial Sequence
  Synthetic polynucleotide
ttaagtcggctttaggcgggggtggtctccggggatcgcggaggtatgcaaaggg

SEQ ID NO: 3755 - DNA, 55 bp, Artificial Sequence
  Synthetic polynucleotide
gactcaaccctggctcccacgccatggccgtggtggttaaacgttcgagaccctc

SEQ ID NO: 3756 - DNA, 55 bp, Artificial Sequence
  Synthetic polynucleotide
tgcagggtgcaccatgcggaacctcaggcggggcgtcacgcatacgttgggctcg

SEQ ID NO: 3757 - DNA, 55 bp, Artificial Sequence
  Synthetic polynucleotide
caaacagtgaattgaaccgtgtgagggcccgggctccccagtggttctgggcgct

SEQ ID NO: 3758 - DNA, 55 bp, Artificial Sequence
  Synthetic polynucleotide
agcaatcgaacgttagcgcgaccgtggaaccggcccagtcctttcgcccgtctct

SEQ ID NO: 3759 - DNA, 55 bp, Artificial Sequence
  Synthetic polynucleotide
ttcgggggttcattcccgcggaaggcacgcaggcgggtcagatgcgggcgacact

SEQ ID NO: 3760 - DNA, 55 bp, Artificial Sequence
  Synthetic polynucleotide
gcgtgggtagtaaaagccccccggctccgggggagagcccactcacgcgaacggg

SEQ ID NO: 3761 - DNA, 55 bp, Artificial Sequence
  Synthetic polynucleotide
gtcttgggtagaggtccgagacgtctccgtagggtcctgactcgctcgaacggtc

SEQ ID NO: 3762 - DNA, 55 bp, Artificial Sequence
  Synthetic polynucleotide
acgacaccagtcgatccgaggtatcccgggaggagcaccgatcacaggcccagga

SEQ ID NO: 3763 - DNA, 55 bp, Artificial Sequence
  Synthetic polynucleotide
cgccagattggtcggccaggtggtaacaggaggtagatgaccgtgggtcgaggcc

SEQ ID NO: 3764 - DNA, 55 bp, Artificial Sequence
  Synthetic polynucleotide
catgggaggttatttaccaatgtattatttaggtatttacctatattattctttt

SEQ ID NO: 3765 - DNA, 55 bp, Artificial Sequence
  Synthetic polynucleotide
ctaggggaaccattaactattaaataaattaggaaaaaaaacgtaatttactgca

SEQ ID NO: 3766 - DNA, 55 bp, Artificial Sequence
  Synthetic polynucleotide
agacacacggtttgtgctttattcttatttaggtgttatttcttaactacatatc

SEQ ID NO: 3767 - DNA, 55 bp, Artificial Sequence
  Synthetic polynucleotide
actttacacaaaaaaactgaaaacaattatgggaaaaacaaactggacgtatgga

SEQ ID NO: 3768 - DNA, 55 bp, Artificial Sequence
  Synthetic polynucleotide
catatttatatcttatctcttctgagatcttggtatctttaagaggttgaagtaa

SEQ ID NO: 3769 - DNA, 55 bp, Artificial Sequence
  Synthetic polynucleotide
tgatttaggccaaggacaattaaaaaataaaggatcttttaaaaaaataccttaa

SEQ ID NO: 3770 - DNA, 55 bp, Artificial Sequence
  Synthetic polynucleotide
caatcgagaacaaagacatgatatataacttggacatgattataatatataatga

SEQ ID NO: 3771 - DNA, 55 bp, Artificial Sequence
  Synthetic polynucleotide
acttttgtttggaggtcagggaagtttcattgggaatagtaatttaattagagaa

SEQ ID NO: 3772 - DNA, 55 bp, Artificial Sequence
  Synthetic polynucleotide
cgttattagctgaatacttgttgttatgtttggactgaattgatttaaatggaaa

SEQ ID NO: 3773 - DNA, 55 bp, Artificial Sequence
  Synthetic polynucleotide
atattaaattggttagcgaaatgaatgaattggtgtgaagtatgatagacacgca

SEQ ID NO: 3774 - DNA, 55 bp, Artificial Sequence
  Synthetic polynucleotide
gataacatcaatcgaacgaaaaactaactacggaaacactgaaaaataggataag

SEQ ID NO: 3775 - DNA, 55 bp, Artificial Sequence
  Synthetic polynucleotide
caaagatagatagaaacaaaaactacgcaaaggcttacaacaatcatatactatg

SEQ ID NO: 3776 - DNA, 55 bp, Artificial Sequence
  Synthetic polynucleotide
ttactagtcgtgtgtgctatggttaagggaaggtggtatataagttatttaaaat

SEQ ID NO: 3777 - DNA, 55 bp, Artificial Sequence
  Synthetic polynucleotide
tagttttttcccctgtctaaggttaacagtaggtcctaaatttctaagctttaaa

SEQ ID NO: 3778 - DNA, 55 bp, Artificial Sequence
  Synthetic polynucleotide
aaatgataatctaacacgaaaaaaaccaacaggaaaattaagataacattacaag

SEQ ID NO: 3779 - DNA, 55 bp, Artificial Sequence
  Synthetic polynucleotide
taagtgtttttagcaaccgaggggttatttgggaagtaactttaggctccaatag

SEQ ID NO: 3780 - DNA, 55 bp, Artificial Sequence
  Synthetic polynucleotide
ccgccaatttatgaatcggtttgtttattttggtattttctcaggcaaatgcaac

SEQ ID NO: 3781 - DNA, 55 bp, Artificial Sequence
  Synthetic polynucleotide
ttgttataataacgcactggctgcctttaaaggctcactgctctataacacctta

SEQ ID NO: 3782 - DNA, 55 bp, Artificial Sequence
  Synthetic polynucleotide
atctatctatgtatgcctgtatgaggcttgtggtgtgagctcgaaaagataatgt

SEQ ID NO: 3783 - DNA, 55 bp, Artificial Sequence
  Synthetic polynucleotide
gcttggttattggccgcaaaaacgtattattggaataaacgtaaacgatgactta

SEQ ID NO: 3784 - DNA, 55 bp, Artificial Sequence
  Synthetic polynucleotide
tataggcagctttgtgcatgattctgtctttggtgtttctgttatgtagggattg

SEQ ID NO: 3785 - DNA, 55 bp, Artificial Sequence
  Synthetic polynucleotide
aacaattgaatgcactcctagaagagaaattgggaagaagacgatataggaaccc

SEQ ID NO: 3786 - DNA, 55 bp, Artificial Sequence
  Synthetic polynucleotide
gacataaccctaatagccgatacgaaaacccggaatagtgaaatatgtgattttg

SEQ ID NO: 3787 - DNA, 55 bp, Artificial Sequence
  Synthetic polynucleotide
cttacagtagtctacactaaaacaaggacgcggaacgaatacacaaaaactacaa

SEQ ID NO: 3788 - DNA, 55 bp, Artificial Sequence
  Synthetic polynucleotide
taaccgcgtcataaaactcctatcctcacccggtatcattattctgtacgattat

SEQ ID NO: 3789 - DNA, 55 bp, Artificial Sequence
  Synthetic polynucleotide
ttaaaggtatttcgcgcaactggatagcaaaggatgcgctgaacacttaatatga

SEQ ID NO: 3790 - DNA, 55 bp, Artificial Sequence
  Synthetic polynucleotide
atgcactgagcaatttcaagatttgggtgatggctagtgggtgttcaaatttttt

SEQ ID NO: 3791 - DNA, 55 bp, Artificial Sequence
  Synthetic polynucleotide
ttaaggtatgctgggtcagacaggcaaaggtggaacagaacaattatttttgcaa

SEQ ID NO: 3792 - DNA, 55 bp, Artificial Sequence
  Synthetic polynucleotide
agagtggcatgatttgcagaccgacaacagtggataagactagaaagttaacatt

SEQ ID NO: 3793 - DNA, 55 bp, Artificial Sequence
  Synthetic polynucleotide
tttagaaaaaattgtacagggtcagacgagaggggggattttttatagcaaatat

SEQ ID NO: 3794 - DNA, 55 bp, Artificial Sequence
  Synthetic polynucleotide
tgataaacgggctgttcgctgaaggggctttggttggttcgttagtactttttaa

SEQ ID NO: 3795 - DNA, 55 bp, Artificial Sequence
  Synthetic polynucleotide
ttttgggtggggccatcatgaggatatttaaggggaacatggatactgaagatga

SEQ ID NO: 3796 - DNA, 55 bp, Artificial Sequence
  Synthetic polynucleotide
taccaattaggcggttctgcctcgtcatttcggttagctgtcagtttgaagtaat

SEQ ID NO: 3797 - DNA, 55 bp, Artificial Sequence
  Synthetic polynucleotide
atttctgggaaagagtctagcggcaaatagagggaaaatgggtcatttagcctga

SEQ ID NO: 3798 - DNA, 55 bp, Artificial Sequence
  Synthetic polynucleotide
ccatataattggctaacaggtaggggtgcttggttaccgttaggacatttcgatc

SEQ ID NO: 3799 - DNA, 55 bp, Artificial Sequence
  Synthetic polynucleotide
tacccctttcacctttcgtggtctaatcctgggttctgacttctaagacgtaaaa

SEQ ID NO: 3800 - DNA, 55 bp, Artificial Sequence
  Synthetic polynucleotide
ttatcatccatcggtgcggtaatcaggttccgggttgaaaagggatagtaatgtg

SEQ ID NO: 3801 - DNA, 55 bp, Artificial Sequence
  Synthetic polynucleotide
aatcactagccatgcgccattcgaggtgcccggagtcacatagtgatttattaaa

SEQ ID NO: 3802 - DNA, 55 bp, Artificial Sequence
  Synthetic polynucleotide
ctgctaaatatctagtcagttgggcatgtatggtgatctaggtcatagcagcctg

SEQ ID NO: 3803 - DNA, 55 bp, Artificial Sequence
  Synthetic polynucleotide
tataccgataggacctcagccctacagacaaggaaccttatcaggctgtacaaat

SEQ ID NO: 3804 - DNA, 55 bp, Artificial Sequence
  Synthetic polynucleotide
acactcttgaacgggacagcaggatcaagagggacagtcttaagtatgtgtgatt

SEQ ID NO: 3805 - DNA, 55 bp, Artificial Sequence
  Synthetic polynucleotide
gcgggttaggttggtgctaatacgcttcggtgggtaatataaatccgctaatttt

SEQ ID NO: 3806 - DNA, 55 bp, Artificial Sequence
  Synthetic polynucleotide
tttgttatattaaacgcaagggttcccggccggcattcaagtttgtggttatacg

SEQ ID NO: 3807 - DNA, 55 bp, Artificial Sequence
  Synthetic polynucleotide
ccagatggttaacaaacacaactacacaagtggtacaacctggcacgtaatagca

SEQ ID NO: 3808 - DNA, 55 bp, Artificial Sequence
  Synthetic polynucleotide
gtaagtaatggggatccaggtagtcaaaggcggagagataccctagtatactatt

SEQ ID NO: 3809 - DNA, 55 bp, Artificial Sequence
  Synthetic polynucleotide
gatcctggccaaacttcaggccgctcttcctgggctatattaggggtctgggtta

SEQ ID NO: 3810 - DNA, 55 bp, Artificial Sequence
  Synthetic polynucleotide
tttcaccgccctggcgcggaatcgccttctcggactagcggggccagaaagaatt

SEQ ID NO: 3811 - DNA, 55 bp, Artificial Sequence
  Synthetic polynucleotide
tattattctcatggagcgccttgcgctttacggtcatgctcgggtatgctcgctt

SEQ ID NO: 3812 - DNA, 55 bp, Artificial Sequence
  Synthetic polynucleotide
tcttagctctctggaacctgtcgactgccttggacgcgtcccggggtatgtccta

SEQ ID NO: 3813 - DNA, 55 bp, Artificial Sequence
  Synthetic polynucleotide
ggcccgggctcggctgctcggaactgtgctaggcttgactccgtaagtttattca

SEQ ID NO: 3814 - DNA, 55 bp, Artificial Sequence
  Synthetic polynucleotide
tagcggcatacttcgtctttgaggcttacgcgggagcctctacctgccatgattt

SEQ ID NO: 3815 - DNA, 55 bp, Artificial Sequence
  Synthetic polynucleotide
cgtcccggtagcgaaacgcatcacaccgcctggacgacgagatgttgcgagatca

SEQ ID NO: 3816 - DNA, 55 bp, Artificial Sequence
  Synthetic polynucleotide
ttggagcgggtaggtactacagcgcgtactgggccgaactagacccagccaaggt

SEQ ID NO: 3817 - DNA, 55 bp, Artificial Sequence
  Synthetic polynucleotide
tcgctgacaccctagtcccaaactggcgcacgggagctcccctatgaattacgcc

SEQ ID NO: 3818 - DNA, 55 bp, Artificial Sequence
  Synthetic polynucleotide
caagatggtccgttgtcgagactgatcgcgaggtgtccaacgcatgcggaacacg

SEQ ID NO: 3819 - DNA, 55 bp, Artificial Sequence
  Synthetic polynucleotide
gtttaaaggcacgacacctagtggcaagtttggacacggcggctcgaaatatcac

SEQ ID NO: 3820 - DNA, 55 bp, Artificial Sequence
  Synthetic polynucleotide
acagcgataatgagcgctcccgacccggagcggggaagatagaaacctatagtat

SEQ ID NO: 3821 - DNA, 55 bp, Artificial Sequence
  Synthetic polynucleotide
agccaggttttagagacattccagtgcagccggagggactgtaccatgtcacgga

SEQ ID NO: 3822 - DNA, 55 bp, Artificial Sequence
  Synthetic polynucleotide
actgtgctagtatagccgatataccgctgagggcccggcaagactcgcagcaccc

SEQ ID NO: 3823 - DNA, 55 bp, Artificial Sequence
  Synthetic polynucleotide
agtcaccgcggaccctcggatacggacaggtggcccccatgtagaattataactg

SEQ ID NO: 3824 - DNA, 55 bp, Artificial Sequence
  Synthetic polynucleotide
ttcgcttggtggcagccccgcggcgccgctggggtagattagaggcgcctcaaga

SEQ ID NO: 3825 - DNA, 55 bp, Artificial Sequence
  Synthetic polynucleotide
aagcatagtccacctgcgcgttgagtttcgtggcggtcctgacagccagggtgcc

SEQ ID NO: 3826 - DNA, 55 bp, Artificial Sequence
  Synthetic polynucleotide
catgtaggccatccgtctggcctgccttctcgggccgtcggaaagacaacccctg

SEQ ID NO: 3827 - DNA, 55 bp, Artificial Sequence
  Synthetic polynucleotide
ttgctgcatcgccgcgcgcgactggagtctcgggaaccccgatgcaatcacgact

SEQ ID NO: 3828 - DNA, 55 bp, Artificial Sequence
  Synthetic polynucleotide
tacaactacgtccgtccacctacgctgcttggggaacgcacgccgcgcgggtatt

SEQ ID NO: 3829 - DNA, 55 bp, Artificial Sequence
  Synthetic polynucleotide
aggaccaagccagcgtcgcggccgctattctggcaagcgggagtacgcggcgcgc

SEQ ID NO: 3830 - DNA, 55 bp, Artificial Sequence
  Synthetic polynucleotide
acagcgctgcttggagcgtctacctggcagtggcgtcagttgcctgggtgcccat

SEQ ID NO: 3831 - DNA, 55 bp, Artificial Sequence
  Synthetic polynucleotide
ctctgttcacacccaacccgcggtggcacacgggagtcgctgcgtttctctccga

SEQ ID NO: 3832 - DNA, 55 bp, Artificial Sequence
  Synthetic polynucleotide
gtgtcgcacgcatacgctgttgcttcgccgtggagggctattgtgcagcccgggc

SEQ ID NO: 3833 - DNA, 55 bp, Artificial Sequence
  Synthetic polynucleotide
cgaattgtggccccagcgaatgcgctgggcagggtccggggggtgcaaaaacctt

SEQ ID NO: 3834 - DNA, 55 bp, Artificial Sequence
  Synthetic polynucleotide
tcgacggcctgggttgcgatggcgagcagagggaacaagctaagctggttccacg

SEQ ID NO: 3835 - DNA, 55 bp, Artificial Sequence
  Synthetic polynucleotide
catctttcccgcgggtcctgacatccagtctggtcggccactccacgactttggc

SEQ ID NO: 3836 - DNA, 55 bp, Artificial Sequence
  Synthetic polynucleotide
tggagttgacgtagtgcggaggcacagagccggctcggaatgccggctgtgatag

SEQ ID NO: 3837 - DNA, 55 bp, Artificial Sequence
  Synthetic polynucleotide
cggttgccggtttaggccgaaacctgccaacggctcaccgaagatcgtgggcagt

SEQ ID NO: 3838 - DNA, 55 bp, Artificial Sequence
  Synthetic polynucleotide
tgggcgacacgtcgcgcctttaggccccgcgggcgtttgtaagcgtcagagtttg

SEQ ID NO: 3839 - DNA, 55 bp, Artificial Sequence
  Synthetic polynucleotide
acctatcttatggctactctttaaatttattgggttacctcttttaattaatttt

SEQ ID NO: 3840 - DNA, 55 bp, Artificial Sequence
  Synthetic polynucleotide
tacttttatttgtaagcaaataattaaaaatggcataatagtaatataaaaatga

SEQ ID NO: 3841 - DNA, 55 bp, Artificial Sequence
  Synthetic polynucleotide
taacatatattcataacatattatttattttggtcgtatattattatttcctgaa

SEQ ID NO: 3842 - DNA, 55 bp, Artificial Sequence
  Synthetic polynucleotide
attttttaacaagggacggatttagaattaaggtgggtgaaaatagaaattggct

SEQ ID NO: 3843 - DNA, 55 bp, Artificial Sequence
  Synthetic polynucleotide
gtaaggattaaagtcgcgttgaaataaaaaaggtgaacattgtaaattaatttac

SEQ ID NO: 3844 - DNA, 55 bp, Artificial Sequence
  Synthetic polynucleotide
tgcgaggggaaaaaaacagcttattatctttggaaatttatatagcttgacaatt

SEQ ID NO: 3845 - DNA, 55 bp, Artificial Sequence
  Synthetic polynucleotide
gtaattttgcttataacaaaacgaaagtaatggtaaaaacggtatacacgaaacg

SEQ ID NO: 3846 - DNA, 55 bp, Artificial Sequence
  Synthetic polynucleotide
tcatgatgcagctatactaaaaaaggtatatggcgtaaaaaatagggagatttat

SEQ ID NO: 3847 - DNA, 55 bp, Artificial Sequence
  Synthetic polynucleotide
attcaattgtgtggttctgaaaaacaaaactggattaaaaaaaaactctcactgc

SEQ ID NO: 3848 - DNA, 55 bp, Artificial Sequence
  Synthetic polynucleotide
aacttagataatttggcgttgaagagtgtaaggaatggttgaaaaaaagtaagaa

SEQ ID NO: 3849 - DNA, 55 bp, Artificial Sequence
  Synthetic polynucleotide
gaaaaaaggaacaaaactaatgtagtcaaaaggctattcaaacctctcactacat

SEQ ID NO: 3850 - DNA, 55 bp, Artificial Sequence
  Synthetic polynucleotide
tatgagtattagtagtcgaaagatataagtaggaattatagaacactggatgctt

SEQ ID NO: 3851 - DNA, 55 bp, Artificial Sequence
  Synthetic polynucleotide
attctttggtgtttcccaagaaaccaacacaggaaaagaacaaaaaataatatac

SEQ ID NO: 3852 - DNA, 55 bp, Artificial Sequence
  Synthetic polynucleotide
tccaacatttcaagaacgagataaagcaaacggatagtataacaagaaaagctat

SEQ ID NO: 3853 - DNA, 55 bp, Artificial Sequence
  Synthetic polynucleotide
tacctaataataagagctagtaaaaaccaaagggctaaagagtttaaaatcgtgt

SEQ ID NO: 3854 - DNA, 55 bp, Artificial Sequence
  Synthetic polynucleotide
gttgtaaagaatgttacggccggtttaatgggggaatcgggttcaaataattcaa

SEQ ID NO: 3855 - DNA, 55 bp, Artificial Sequence
  Synthetic polynucleotide
atacggaaactggggtctattgtttcgtctgggggaatactctttgctttatttt

SEQ ID NO: 3856 - DNA, 55 bp, Artificial Sequence
  Synthetic polynucleotide
atgggggttcttaactcatgtgtctatttggggcgctatatatagtgtgtacaat

SEQ ID NO: 3857 - DNA, 55 bp, Artificial Sequence
  Synthetic polynucleotide
taataggctttcgctgctttgtatttgttctggtgatgctttaggggaagattta

SEQ ID NO: 3858 - DNA, 55 bp, Artificial Sequence
  Synthetic polynucleotide
aattatctcggtgatgcgtgctgaataatgtgggcataactgttgtgtgaatcaa

SEQ ID NO: 3859 - DNA, 55 bp, Artificial Sequence
  Synthetic polynucleotide
aataggcctacatggcctggaagatattaggggcagttagaattaagttatcata

SEQ ID NO: 3860 - DNA, 55 bp, Artificial Sequence
  Synthetic polynucleotide
gatctagagtttcgaccttaccgcaatgatcggaccacgtatacatgtataatat

SEQ ID NO: 3861 - DNA, 55 bp, Artificial Sequence
  Synthetic polynucleotide
caaaaagttaacatagcgcaagttagtaaaaggttcaagccaattccatcgaacg

SEQ ID NO: 3862 - DNA, 55 bp, Artificial Sequence
  Synthetic polynucleotide
aaattattaatctactctgtcctgttcaaacgggtctctgtcgatgtccttctga

SEQ ID NO: 3863 - DNA, 55 bp, Artificial Sequence
  Synthetic polynucleotide
tttaagtggtaaagatccaagcataagacgcggcagaccagcaagaaataagatt

SEQ ID NO: 3864 - DNA, 55 bp, Artificial Sequence
  Synthetic polynucleotide
gttcaagaaggtgccacaaaaggaagttgatggggtcaagtgttagaataagtaa

SEQ ID NO: 3865 - DNA, 55 bp, Artificial Sequence
  Synthetic polynucleotide
tatatatgacttagctccaacccttcgatcaggcccaatactctttcctagtata

SEQ ID NO: 3866 - DNA, 55 bp, Artificial Sequence
  Synthetic polynucleotide
cttgaggtataagttcctaagtcaaacagaagggtccacaaagagagtatcagaa

SEQ ID NO: 3867 - DNA, 55 bp, Artificial Sequence
  Synthetic polynucleotide
ccggttcgatgttgtacgtgacataaaggttggtaacgtgtaagatataatgctt

SEQ ID NO: 3868 - DNA, 55 bp, Artificial Sequence
  Synthetic polynucleotide
tacggtattaatagggcaattgaattgaggcgggagccaataaaagatgttaaaa

SEQ ID NO: 3869 - DNA, 55 bp, Artificial Sequence
  Synthetic polynucleotide
tagaattatgtctagtccccacacctttctagggtctagtccccttagtgcaaga

SEQ ID NO: 3870 - DNA, 55 bp, Artificial Sequence
  Synthetic polynucleotide
aaatctcatactcattcctggatgctttctcgggtccttcagatgaaggcgaaat

SEQ ID NO: 3871 - DNA, 55 bp, Artificial Sequence
  Synthetic polynucleotide
acacgtcttcaatcagcttcttccacttcatggctctcccgtactttatagggat

SEQ ID NO: 3872 - DNA, 55 bp, Artificial Sequence
  Synthetic polynucleotide
tacgttcatttaaccccgctttagttgttacgggtccggtcccattggtttctta

SEQ ID NO: 3873 - DNA, 55 bp, Artificial Sequence
  Synthetic polynucleotide
cgtcagttaattcgaaccctcctctaattctggttcacctactccaagagggata

SEQ ID NO: 3874 - DNA, 55 bp, Artificial Sequence
  Synthetic polynucleotide
caaattataggctaagctcctcatctttaccggctctacatccatttctcaccct

SEQ ID NO: 3875 - DNA, 55 bp, Artificial Sequence
  Synthetic polynucleotide
ttcattatctatgttgcagggatgtggtctaggtaggaccttacgtgatgcgatt

SEQ ID NO: 3876 - DNA, 55 bp, Artificial Sequence
  Synthetic polynucleotide
aggttagatccaaatccacctccatcgttgcggaccccaaatatcacaacagaat

SEQ ID NO: 3877 - DNA, 55 bp, Artificial Sequence
  Synthetic polynucleotide
atgatgatatcttggcccagaagctaggtgaggccatatgagctaagtattgagc

SEQ ID NO: 3878 - DNA, 55 bp, Artificial Sequence
  Synthetic polynucleotide
gagtaccacaaggggacttacatagtacaagggatagaggggtaggtaatgctaa

SEQ ID NO: 3879 - DNA, 55 bp, Artificial Sequence
  Synthetic polynucleotide
agtcggagctgaagttcagaacagtaaggtcggaagttacagctaaagccatatg

SEQ ID NO: 3880 - DNA, 55 bp, Artificial Sequence
  Synthetic polynucleotide
aataggctcaaatctccgttaaggtccaatcggcgtgtctctaagaaaaatctcg

SEQ ID NO: 3881 - DNA, 55 bp, Artificial Sequence
  Synthetic polynucleotide
tgaaatcatagtaactcaatccacgacaacaggcatcccaactcactctctcgag

SEQ ID NO: 3882 - DNA, 55 bp, Artificial Sequence
  Synthetic polynucleotide
ttaatagttacagtaccggagacatagaggcggttttcgaggggtacatagagct

SEQ ID NO: 3883 - DNA, 55 bp, Artificial Sequence
  Synthetic polynucleotide
aaattacgagaaagggctctagaaagtgaggggatttggacccataagtttagag

SEQ ID NO: 3884 - DNA, 55 bp, Artificial Sequence
  Synthetic polynucleotide
ttgaggcaacctggggcgagtcgtgattctgggtgttatacgaggtgtctccacg

SEQ ID NO: 3885 - DNA, 55 bp, Artificial Sequence
  Synthetic polynucleotide
aagctgggtaagaggccggtcacgagttctgggcccccaaactttcaaatagggg

SEQ ID NO: 3886 - DNA, 55 bp, Artificial Sequence
  Synthetic polynucleotide
tcctttgggcacatggcgcatctgatctttgggcacattatgacttcccactacc

SEQ ID NO: 3887 - DNA, 55 bp, Artificial Sequence
  Synthetic polynucleotide
aatttccagggtgcatcctcatcggttccttggcacgccgttctttatgcgagag

SEQ ID NO: 3888 - DNA, 55 bp, Artificial Sequence
  Synthetic polynucleotide
aaggtgtggcgcgctccgtaatcagcctctcggctcttgctgacacaatggctcc

SEQ ID NO: 3889 - DNA, 55 bp, Artificial Sequence
  Synthetic polynucleotide
agacatggcggggaatccctaaggtcattacgggccagtgccattacctttgcct

SEQ ID NO: 3890 - DNA, 55 bp, Artificial Sequence
  Synthetic polynucleotide
gaccaacgtccgcttgcggggattaggtcatggcaatcgtaagggagtcgttact

SEQ ID NO: 3891 - DNA, 55 bp, Artificial Sequence
  Synthetic polynucleotide
ttgacttcacctgcggcagcgggttgtcactggccgctatggacgttggagcttt

SEQ ID NO: 3892 - DNA, 55 bp, Artificial Sequence
  Synthetic polynucleotide
tcctccgagcactcttctcctcgagatgtccggccacagctcgtccaatatccta

SEQ ID NO: 3893 - DNA, 55 bp, Artificial Sequence
  Synthetic polynucleotide
tgctccggtttccgccctaatagtagcgtccggtatggaagcccctaccatgaaa

SEQ ID NO: 3894 - DNA, 55 bp, Artificial Sequence
  Synthetic polynucleotide
cgtaccagcagggcgccgccttcatactgtaggcgccgggaccaagctgatataa

SEQ ID NO: 3895 - DNA, 55 bp, Artificial Sequence
  Synthetic polynucleotide
gcctgtctatttatcgcgaggccccgttgtgggagcacgggtcccccagttcatt

SEQ ID NO: 3896 - DNA, 55 bp, Artificial Sequence
  Synthetic polynucleotide
ttggtcagtcggatgactgatactcccgggcgggaaccggttccccgtaaaactc

SEQ ID NO: 3897 - DNA, 55 bp, Artificial Sequence
  Synthetic polynucleotide
tagtctcaacgactggcgacggatatccgttgggaccctgataagacgttacagc

SEQ ID NO: 3898 - DNA, 55 bp, Artificial Sequence
  Synthetic polynucleotide
ccgagtagagggctcactactgaccaacggagggggtgacaagcggcgaaaaacg

SEQ ID NO: 3899 - DNA, 55 bp, Artificial Sequence
  Synthetic polynucleotide
atgctggcggcctcgccccgcgtcctagctcgggcattacgtctacatctcaagg

SEQ ID NO: 3900 - DNA, 55 bp, Artificial Sequence
  Synthetic polynucleotide
gacgggcgacggacggcccgcttgcttactcggcgttatcagtcctaggcacaat

SEQ ID NO: 3901 - DNA, 55 bp, Artificial Sequence
  Synthetic polynucleotide
gggacgggccctgaggctgtttggtttgcagggcagcactggcggactgcggcaa

SEQ ID NO: 3902 - DNA, 55 bp, Artificial Sequence
  Synthetic polynucleotide
agtttctccgaggtgaccgtcgggtgctcttggcccgcctcctcgcccctagagg

SEQ ID NO: 3903 - DNA, 55 bp, Artificial Sequence
  Synthetic polynucleotide
gacgctatccagcttcctggccgctcgccaaggtgtgtctccgaagaccgaagtc

SEQ ID NO: 3904 - DNA, 55 bp, Artificial Sequence
  Synthetic polynucleotide
ctctagggaagcagggcccccccaaaattgggggaaagccccttcgctaaaccgc

SEQ ID NO: 3905 - DNA, 55 bp, Artificial Sequence
  Synthetic polynucleotide
ccggcagagcgacgcacgcgcgaacgatttcggctaccgcgtcgctatacgattt

SEQ ID NO: 3906 - DNA, 55 bp, Artificial Sequence
  Synthetic polynucleotide
ccgcggatcgtccgcccgcacgccccgaatggggcgacgaagacggtactagtcc

SEQ ID NO: 3907 - DNA, 55 bp, Artificial Sequence
  Synthetic polynucleotide
ctgacggctcgggaagccggagctcggcactggttgcgcagctgaagtcgggcga

SEQ ID NO: 3908 - DNA, 55 bp, Artificial Sequence
  Synthetic polynucleotide
gaggcgagtgcaccagcctggttgagtcgccggcaacgatgtgggggtgatcggt

SEQ ID NO: 3909 - DNA, 55 bp, Artificial Sequence
  Synthetic polynucleotide
ggaaggcgtgccggagccgatgtcagcgaatgggaccgcctcctgaccggaacac

SEQ ID NO: 3910 - DNA, 55 bp, Artificial Sequence
  Synthetic polynucleotide
aactggtactgcaggtctacccgctccagacgggggccgggaagagtctcgtttc

SEQ ID NO: 3911 - DNA, 55 bp, Artificial Sequence
  Synthetic polynucleotide
cgagtaccgaatccaacgagtaacgtgcaggggccggctccgcgagtgaagcgat

SEQ ID NO: 3912 - DNA, 55 bp, Artificial Sequence
  Synthetic polynucleotide
cggtaatgtaactcgaccagagtgccagacgggatcgcagacgcccggtgggagc

SEQ ID NO: 3913 - DNA, 55 bp, Artificial Sequence
  Synthetic polynucleotide
ccccccagtaggcctgcccctatgaacggccggcggtggttacccgttgattgaa

SEQ ID NO: 3914 - DNA, 55 bp, Artificial Sequence
  Synthetic polynucleotide
ttattttaaaattaatcaaatccgttattttggcaaaattaatcaacgtgttccg

SEQ ID NO: 3915 - DNA, 55 bp, Artificial Sequence
  Synthetic polynucleotide
tccaatgcatgaattgctttactttctttatggcatatatcttttctctgatatt

SEQ ID NO: 3916 - DNA, 55 bp, Artificial Sequence
  Synthetic polynucleotide
gagcattttttattaccactttattaattgtggtttttacattattttgtttttt

SEQ ID NO: 3917 - DNA, 55 bp, Artificial Sequence
  Synthetic polynucleotide
cactaaatatagatgacctgaaaaaaatttaggaatttaaaaaaataataattac

SEQ ID NO: 3918 - DNA, 55 bp, Artificial Sequence
  Synthetic polynucleotide
ttataactagtctctccttaaaaaataaagtggtgtaaaatttaataaaatttct

SEQ ID NO: 3919 - DNA, 55 bp, Artificial Sequence
  Synthetic polynucleotide
tcgataaagtttgtggcatttgtagaaatatgggtgtgttaaaagagaattacga

SEQ ID NO: 3920 - DNA, 55 bp, Artificial Sequence
  Synthetic polynucleotide
aaagtttaagttggggcagaagtaaaaaataggggtcaacttaacattaaatgca

SEQ ID NO: 3921 - DNA, 55 bp, Artificial Sequence
  Synthetic polynucleotide
tatgtttaatctgggtcaatagtaagttattgggaggagtaaataagaatacatg

SEQ ID NO: 3922 - DNA, 55 bp, Artificial Sequence
  Synthetic polynucleotide
aaattatcgaagaatacaccactaaaaaagaggaataaataaataaactcataag

SEQ ID NO: 3923 - DNA, 55 bp, Artificial Sequence
  Synthetic polynucleotide
tcctcaattaagattacgaggtaaaactagcggattaagtaactacaaaaattct

SEQ ID NO: 3924 - DNA, 55 bp, Artificial Sequence
  Synthetic polynucleotide
tccagctgttgttagtcttaaaaaaacaagtggttaaattgagaaaacaagatgt

SEQ ID NO: 3925 - DNA, 55 bp, Artificial Sequence
  Synthetic polynucleotide
tttgttgatccttgttcacaaaaaaaatgaaggttccaaaaagatagatagtaat

SEQ ID NO: 3926 - DNA, 55 bp, Artificial Sequence
  Synthetic polynucleotide
actttctacggggtttctaaaaacgaagggaggtattataaaataaaaagaaaaa

SEQ ID NO: 3927 - DNA, 55 bp, Artificial Sequence
  Synthetic polynucleotide
taaaaaattaagtagacagttaaaaaacgaaggttttaaccccaagtaaaaatct

SEQ ID NO: 3928 - DNA, 55 bp, Artificial Sequence
  Synthetic polynucleotide
ctaacagtattgcaaacgagaaaatcgaaggggttgctaaaaaaaaatatgacat

SEQ ID NO: 3929 - DNA, 55 bp, Artificial Sequence
  Synthetic polynucleotide
acaataggggccttagcatactaattatatggggggccttcaatatatacacaaa

SEQ ID NO: 3930 - DNA, 55 bp, Artificial Sequence
  Synthetic polynucleotide
aaattttgattgggggctgtgcataattatgggtattgtatggccacagaaaatc

SEQ ID NO: 3931 - DNA, 55 bp, Artificial Sequence
  Synthetic polynucleotide
ggatggccgtggaattcatgtttcttattggggtgatgttatttaatttaccgta

SEQ ID NO: 3932 - DNA, 55 bp, Artificial Sequence
  Synthetic polynucleotide
aattttttttttgcatcaacaatcatcttttgggtccctagatcaagcaatcgga

SEQ ID NO: 3933 - DNA, 55 bp, Artificial Sequence
  Synthetic polynucleotide
cgataggctcaaaaaccgcataaataaaacaggctaaaaagcataacctgccaag

SEQ ID NO: 3934 - DNA, 55 bp, Artificial Sequence
  Synthetic polynucleotide
tcataacggacgagggcataaaaaaaatacgggaaggaacagaagaactatatgc

SEQ ID NO: 3935 - DNA, 55 bp, Artificial Sequence
  Synthetic polynucleotide
tgagaatcaaagaactcccctacttaaagaaggtcaactcccttatcaccaagta

SEQ ID NO: 3936 - DNA, 55 bp, Artificial Sequence
  Synthetic polynucleotide
gttcctaatagatgagcaaacaaagcaatacggaaattgcctgcaaacaaccgaa

SEQ ID NO: 3937 - DNA, 55 bp, Artificial Sequence
  Synthetic polynucleotide
tgaaatgataagatgactcccgaagaaaattggataaacctgaagagaatgtagg

SEQ ID NO: 3938 - DNA, 55 bp, Artificial Sequence
  Synthetic polynucleotide
tcaaatatgaagatgccggtaatttgtgaagggatccgatgcgtatttgtttctg

SEQ ID NO: 3939 - DNA, 55 bp, Artificial Sequence
  Synthetic polynucleotide
gaacggagccaagtcactaaaatccaagaagggtcacacatcaaaaaaactttta

SEQ ID NO: 3940 - DNA, 55 bp, Artificial Sequence
  Synthetic polynucleotide
taaaactaaaaaaaacccgtactgagcaaaaggggaaagggcccttaataactgc

SEQ ID NO: 3941 - DNA, 55 bp, Artificial Sequence
  Synthetic polynucleotide
ttgtggtggttacatccaagtataaagtggtgggaactatcgaattataaagcac

SEQ ID NO: 3942 - DNA, 55 bp, Artificial Sequence
  Synthetic polynucleotide
ctgtcgatgtaacaaccttaaaacccccgaaggtaataacaatctttaccccaaa

SEQ ID NO: 3943 - DNA, 55 bp, Artificial Sequence
  Synthetic polynucleotide
ttgttactttgcagtacgagatgactgcgtaggattcatgagatgaactatttcg

SEQ ID NO: 3944 - DNA, 55 bp, Artificial Sequence
  Synthetic polynucleotide
gaaacttatgtagttccaacttgcctttcgagggttgttccccttgaagagtact

SEQ ID NO: 3945 - DNA, 55 bp, Artificial Sequence
  Synthetic polynucleotide
tttttgtagggcttggctgtctaattattttggggaaggtcgaacgtattagcca

SEQ ID NO: 3946 - DNA, 55 bp, Artificial Sequence
  Synthetic polynucleotide
tgaacgaaatgggtggctcgtttcttattggggattgctaagacggtaacttaac

SEQ ID NO: 3947 - DNA, 55 bp, Artificial Sequence
  Synthetic polynucleotide
taaatctcgaggggtacggctttcgttctggggatttgtaatctttggtaaatgt

SEQ ID NO: 3948 - DNA, 55 bp, Artificial Sequence
  Synthetic polynucleotide
gaatgggggcaaaggccgtcgtttattctagggaggattgttattactattccct

SEQ ID NO: 3949 - DNA, 55 bp, Artificial Sequence
  Synthetic polynucleotide
agattagcgggctttacatcctgtacttaggggcacagaactacactgttaatat

SEQ ID NO: 3950 - DNA, 55 bp, Artificial Sequence
  Synthetic polynucleotide
gcatttttattggggccgttcttatccaattggttgggccgatatagacgtagga

SEQ ID NO: 3951 - DNA, 55 bp, Artificial Sequence
  Synthetic polynucleotide
gagtatacattctggactcgcggaaaactaaggtagagaactggaaaaggaaagg

SEQ ID NO: 3952 - DNA, 55 bp, Artificial Sequence
  Synthetic polynucleotide
gcatttttattggatactcttgccgaaggggggacttggaaaagcgtgtgaaata

SEQ ID NO: 3953 - DNA, 55 bp, Artificial Sequence
  Synthetic polynucleotide
tgcataactcattaccctacacagagtctctggaacacctacacaatacgtgacc

SEQ ID NO: 3954 - DNA, 55 bp, Artificial Sequence
  Synthetic polynucleotide
tgtttttattaaggagcgagcatttagggtggggaggatatgcgatttagcaaag

SEQ ID NO: 3955 - DNA, 55 bp, Artificial Sequence
  Synthetic polynucleotide
ggtctattcggggactcacaaaaactggaggggagcaactacatatagaatagta

SEQ ID NO: 3956 - DNA, 55 bp, Artificial Sequence
  Synthetic polynucleotide
attgtacggtttgcgacgaagagactgcggggggttagatctagttaattaaaag

SEQ ID NO: 3957 - DNA, 55 bp, Artificial Sequence
  Synthetic polynucleotide
tctgggggatgaagagctgatatgcacaaggggagttgatttaagtgagattaca

SEQ ID NO: 3958 - DNA, 55 bp, Artificial Sequence
  Synthetic polynucleotide
attttgttcgtacggccagagatagagggttggcgttaaagagttcatcattcac

SEQ ID NO: 3959 - DNA, 55 bp, Artificial Sequence
  Synthetic polynucleotide
aggaccggatggtacgcggggtgctaatttaggacagggtcaggcatcgtaccga

SEQ ID NO: 3960 - DNA, 55 bp, Artificial Sequence
  Synthetic polynucleotide
tatgatcggtaggcagctctccgaatttcatgggcgtctctcgagttgatctgca

SEQ ID NO: 3961 - DNA, 55 bp, Artificial Sequence
  Synthetic polynucleotide
agagttaaccatggagccccccctttctctgggggagaattgacccttgatccag

SEQ ID NO: 3962 - DNA, 55 bp, Artificial Sequence
  Synthetic polynucleotide
tcatacatgggttggtctggtactcgcccagggaggacaactaagagatcggtgt

SEQ ID NO: 3963 - DNA, 55 bp, Artificial Sequence
  Synthetic polynucleotide
ctttgactttgtaggtcatcccgtgcatttggggtttggggcaggacccgtcgat

SEQ ID NO: 3964 - DNA, 55 bp, Artificial Sequence
  Synthetic polynucleotide
tggctccgagctccccccatgcgagtatataggctgcccggaatcgagctagagt

SEQ ID NO: 3965 - DNA, 55 bp, Artificial Sequence
  Synthetic polynucleotide
cacatggcgcggggtccgtccccatcacacgggtgagtgttttattaagtcccca

SEQ ID NO: 3966 - DNA, 55 bp, Artificial Sequence
  Synthetic polynucleotide
aaatagaggtggctatccgttccgtgcgaaggggtaggctattgggttcccttct

SEQ ID NO: 3967 - DNA, 55 bp, Artificial Sequence
  Synthetic polynucleotide
tttcgagcggtcggggctcatgccagtaacggggggaaaatttgggattgggcat

SEQ ID NO: 3968 - DNA, 55 bp, Artificial Sequence
  Synthetic polynucleotide
caatgtgacaatgggtccggacattgatagggggcaggagggggtataagatgga

SEQ ID NO: 3969 - DNA, 55 bp, Artificial Sequence
  Synthetic polynucleotide
gtgacctcagcgctagcatgaactacccagagggcggcgcatatttgacccggat

SEQ ID NO: 3970 - DNA, 55 bp, Artificial Sequence
  Synthetic polynucleotide
gggtcatcaggttcaaccccgatccgttgcaggggaccccaggattcgtgaattc

SEQ ID NO: 3971 - DNA, 55 bp, Artificial Sequence
  Synthetic polynucleotide
tagacggccaggtacccctacacgcacgggaggtacccaatccgatatcgcttga

SEQ ID NO: 3972 - DNA, 55 bp, Artificial Sequence
  Synthetic polynucleotide
gtgcagggggtacggacgactcttaaccagaggggccctctacgcgtttcatctc

SEQ ID NO: 3973 - DNA, 55 bp, Artificial Sequence
  Synthetic polynucleotide
agacttatcctatccgcgagaatagacacccggcgtacagaaggacgccatggag

SEQ ID NO: 3974 - DNA, 55 bp, Artificial Sequence
  Synthetic polynucleotide
ggtctcccgctcgcggccaccaccagttctcgggattcacccgctaactctgtga

SEQ ID NO: 3975 - DNA, 55 bp, Artificial Sequence
  Synthetic polynucleotide
aatgtctagggtcgctcggatcacgcgcctgggtgtgcctcattgcgcctatgcg

SEQ ID NO: 3976 - DNA, 55 bp, Artificial Sequence
  Synthetic polynucleotide
cggggagccgcgggctctgactctgtatttgggggcgcccccgctccggaacatt

SEQ ID NO: 3977 - DNA, 55 bp, Artificial Sequence
  Synthetic polynucleotide
ttcctcgagcgctcgcccagctcgagtttggggaaacgcgcagcgagggtaggca

SEQ ID NO: 3978 - DNA, 55 bp, Artificial Sequence
  Synthetic polynucleotide
cgattctcgaccttgtccgcggcgattatgtgggttaagcgcgcggcggcagcta

SEQ ID NO: 3979 - DNA, 55 bp, Artificial Sequence
  Synthetic polynucleotide
ggggacggggtcagcacggggtctttcttgtggctggacgttcctcctccaccgc

SEQ ID NO: 3980 - DNA, 55 bp, Artificial Sequence
  Synthetic polynucleotide
tggcacttctggagggccgatctaaactatgggggccctcggcgctcccggataa

SEQ ID NO: 3981 - DNA, 55 bp, Artificial Sequence
  Synthetic polynucleotide
accgtggggtgggcgtcgccggcgctcgagagggagaatcgacgcgaattctgta

SEQ ID NO: 3982 - DNA, 55 bp, Artificial Sequence
  Synthetic polynucleotide
cggttgcacccgggggccgcggactctgtatgggtgggcagtacacaccatatct

SEQ ID NO: 3983 - DNA, 55 bp, Artificial Sequence
  Synthetic polynucleotide
cgctgttacaagaccccctccccaacggattggtagtgcccctagaaggtggccc

SEQ ID NO: 3984 - DNA, 55 bp, Artificial Sequence
  Synthetic polynucleotide
acgaatccgaggcccgccccattgaagcgggggttcaatgacgcccctagtcgag

SEQ ID NO: 3985 - DNA, 55 bp, Artificial Sequence
  Synthetic polynucleotide
gacgacacattggctaccaccccgtcggactggggggccctggtataagcacaag

SEQ ID NO: 3986 - DNA, 55 bp, Artificial Sequence
  Synthetic polynucleotide
gcgctcgcgcgtagatccagccacccacggaggtacttgccaagattctgcccgt

SEQ ID NO: 3987 - DNA, 55 bp, Artificial Sequence
  Synthetic polynucleotide
atctgatcagggcacccccatcaatccaggcggagtgtcggccccgcggctctta

SEQ ID NO: 3988 - DNA, 55 bp, Artificial Sequence
  Synthetic polynucleotide
ggatcctcggggagagcaactaacaccagtcgggagcgaggagacactgacgccc

SEQ ID NO: 3989 - DNA, 55 bp, Artificial Sequence
  Synthetic polynucleotide
aggccagcaggctgatgtagtcactcttgagggccagcgtccagatgcccactgc

SEQ ID NO: 3990 - DNA, 55 bp, Artificial Sequence
  Synthetic polynucleotide
gccactacacagatgcaggctgcagatgcccggaagtccttcccatgcttcgatg

SEQ ID NO: 3991 - DNA, 55 bp, Artificial Sequence
  Synthetic polynucleotide
agtcccagcaggccctcggcggcggctcccagggagcgtcccggaaccggggcgg

SEQ ID NO: 3992 - DNA, 55 bp, Artificial Sequence
  Synthetic polynucleotide
ggaagccagcacagaacatgttgttatagatggtgaactttgtagatcgaagaca

SEQ ID NO: 3993 - DNA, 55 bp, Artificial Sequence
  Synthetic polynucleotide
acgctctggaacagattctggaaagctcctcggtaggtcttggacggcggccgag

SEQ ID NO: 3994 - DNA, 55 bp, Artificial Sequence
  Synthetic polynucleotide
catgtggctcggtcaacaagtggaactctaaggtactgaagaactaaagctgatc

SEQ ID NO: 3995 - DNA, 55 bp, Artificial Sequence
  Synthetic polynucleotide
cactcccgccggagtatttcaggggctcttgggaaactccttcatacatcagccc

SEQ ID NO: 3996 - DNA, 55 bp, Artificial Sequence
  Synthetic polynucleotide
atggtcctctgggagggctgtgctgctagtgggtacctcagtcacacacccccaa

SEQ ID NO: 3997 - DNA, 55 bp, Artificial Sequence
  Synthetic polynucleotide
caatgttcacgcaacttgaaattatatctgtggtcttcaaattgtcttttgtcat

SEQ ID NO: 3998 - DNA, 55 bp, Artificial Sequence
  Synthetic polynucleotide
gactgctttggtagagaaagaagcagtgcctgggataaaggtatcttctcacttg

SEQ ID NO: 3999 - DNA, 55 bp, Artificial Sequence
  Synthetic polynucleotide
gtcacttaggataggagaagatgatgtatagggtttagtgggagatgttgcaagg

SEQ ID NO: 4000 - DNA, 55 bp, Artificial Sequence
  Synthetic polynucleotide
acttttaatagcatacagtgatttgatgaaaggacgtcaaacaatgtggcgatgt

SEQ ID NO: 4001 - DNA, 55 bp, Artificial Sequence
  Synthetic polynucleotide
ctgggatggtgggggccctcctcttgctgctggtggtggccctggggatcggcct

SEQ ID NO: 4002 - DNA, 55 bp, Artificial Sequence
  Synthetic polynucleotide
tagagagggtgaaaatcatcagttatcatcagggcaacaaattgctttctcctag

SEQ ID NO: 4003 - DNA, 55 bp, Artificial Sequence
  Synthetic polynucleotide
agcttctgggttcatgagtcttgacaacaacggtactgctaccccagagttacct

SEQ ID NO: 4004 - DNA, 55 bp, Artificial Sequence
  Synthetic polynucleotide
acatcctggtggtggcgggcactgtcgtcatggtgactggggtcttgggctgctg

SEQ ID NO: 4005 - DNA, 55 bp, Artificial Sequence
  Synthetic polynucleotide
ccccatggcaatgacagtgccaaagccagccgggccaggaccaaagccggtgatc

SEQ ID NO: 4006 - DNA, 55 bp, Artificial Sequence
  Synthetic polynucleotide
acctatgagcacagtagaactaagggtgggtggtgtagctaaagaacttgaccaa

SEQ ID NO: 4007 - DNA, 55 bp, Artificial Sequence
  Synthetic polynucleotide
ctaccctcggccgccgtccaagacctaccgaggagctttccagaatctgttccag

SEQ ID NO: 4008 - DNA, 55 bp, Artificial Sequence
  Synthetic polynucleotide
atgttggacagggctgtcaggtccttggggtggataagcgtgatgttgaactcgg

SEQ ID NO: 4009 - DNA, 55 bp, Artificial Sequence
  Synthetic polynucleotide
cgtgggctttaccatgagtaactccattcctggtatagaatccccatttgaacaa

SEQ ID NO: 4010 - DNA, 55 bp, Artificial Sequence
  Synthetic polynucleotide
cttccatgaaggaggtagagattcatgtcaaggagatagtgggggaccccatgtt

SEQ ID NO: 4011 - DNA, 55 bp, Artificial Sequence
  Synthetic polynucleotide
ttcaactttagaacgaatacagaaaagtaaaggacgtgcagaaaaaatcagacac

SEQ ID NO: 4012 - DNA, 55 bp, Artificial Sequence
  Synthetic polynucleotide
gagtagtcagatccgtggcccatcatgtcttggaaacgtttttgtccctgctgcc

SEQ ID NO: 4013 - DNA, 55 bp, Artificial Sequence
  Synthetic polynucleotide
actcgcttccggtggacaagcggcagatagcggaaagagccgcttcgtttcctgc

SEQ ID NO: 4014 - DNA, 55 bp, Artificial Sequence
  Synthetic polynucleotide
gaatgcacaagaactgcaaagtgaaacaaaaggaaataaaatccatgatgaacat

SEQ ID NO: 4015 - DNA, 55 bp, Artificial Sequence
  Synthetic polynucleotide
ctctgctggaactgacacgcagacattcagcggctccgccgccaatgcaaaactc

SEQ ID NO: 4016 - DNA, 55 bp, Artificial Sequence
  Synthetic polynucleotide
caggggcttccgaagctggaatctgctctctggaggcaaggctgcccaaacagcc

SEQ ID NO: 4017 - DNA, 55 bp, Artificial Sequence
  Synthetic polynucleotide
tgacccttgggaccagccggggcagtgaagcggaggtctttctctgcagaaggcc

SEQ ID NO: 4018 - DNA, 55 bp, Artificial Sequence
  Synthetic polynucleotide
ggatgctgaggagtatctggtaccccagcagggcttcttctgtccagaccctgcc

SEQ ID NO: 4019 - DNA, 55 bp, Artificial Sequence
  Synthetic polynucleotide
ggttcgggggctgggcaggcgacccgccgcaggtccccgggaggggcgaacgggc

SEQ ID NO: 4020 - DNA, 55 bp, Artificial Sequence
  Synthetic polynucleotide
agtactcggggttctccacggcacccccaaaggcaaaaacgtctttgacgacccc

SEQ ID NO: 4021 - DNA, 55 bp, Artificial Sequence
  Synthetic polynucleotide
gggtgcggaagagaaagaataccatgcagaaggaggcaaagtaaggaggtggctt

SEQ ID NO: 4022 - DNA, 55 bp, Artificial Sequence
  Synthetic polynucleotide
gcgcctccgcctcctcctctgctccgccaccggcttcctcctcctgagcagtcag

SEQ ID NO: 4023 - DNA, 55 bp, Artificial Sequence
  Synthetic polynucleotide
cgggctgactgctcaggaggaggaagccggtggcggagcagaggaggaggcggag

SEQ ID NO: 4024 - DNA, 55 bp, Artificial Sequence
  Synthetic polynucleotide
cgcgcccagggctgaggaggggtcgcggcgaggacagccgggactgggcgcaggc

SEQ ID NO: 4025 - DNA, 55 bp, Artificial Sequence
  Synthetic polynucleotide
atttctccctcaagctgtttgccaaagaggtggctccagtgcccaaaatccacta

SEQ ID NO: 4026 - DNA, 55 bp, Artificial Sequence
  Synthetic polynucleotide
aggtcgcggtgcacgcagcggcgggagcccaggtactccatgccctgcgggcggg

SEQ ID NO: 4027 - DNA, 55 bp, Artificial Sequence
  Synthetic polynucleotide
agcagctgccggcccccaagtggacagagctggccctgctgattcaacagtgcat

SEQ ID NO: 4028 - DNA, 55 bp, Artificial Sequence
  Synthetic polynucleotide
cgcaggatccggaagggctaggcgggggcgcggcggtgcagcctctcccgagcgc

SEQ ID NO: 4029 - DNA, 55 bp, Artificial Sequence
  Synthetic polynucleotide
gtcatataacgcaaataaccttctgtgtcatggcttggctaataagcatgcaatt

SEQ ID NO: 4030 - DNA, 55 bp, Artificial Sequence
  Synthetic polynucleotide
cagttcgtcagcaccaagtctgagtggaccaggataggagggagccccaagttcc

SEQ ID NO: 4031 - DNA, 55 bp, Artificial Sequence
  Synthetic polynucleotide
ggcatatggagcaggactcctttcctccattggagaattaaaggtatgaagctgt

SEQ ID NO: 4032 - DNA, 55 bp, Artificial Sequence
  Synthetic polynucleotide
ctgtggcactgctgcgcctctgctgcgcctcgggtgtcttttgcggcggtgggtc

SEQ ID NO: 4033 - DNA, 55 bp, Artificial Sequence
  Synthetic polynucleotide
tattggagttgaagccagctgattataagatggtttcctttgtggagttttaaat

SEQ ID NO: 4034 - DNA, 55 bp, Artificial Sequence
  Synthetic polynucleotide
cttactccggccaaaaaagaactgcacctctggagcgggttagtggtggtggtag

SEQ ID NO: 4035 - DNA, 55 bp, Artificial Sequence
  Synthetic polynucleotide
ttgtcagtgagttcgactacgtggagaagcaggcatccaatggtgtcttggtatg

SEQ ID NO: 4036 - DNA, 55 bp, Artificial Sequence
  Synthetic polynucleotide
ccggaagaagcgaccaaagcgcctgaggaccggcaacatggtgcggtcggggaat

SEQ ID NO: 4037 - DNA, 55 bp, Artificial Sequence
  Synthetic polynucleotide
caggcacctacctggccacagcctacatcctggtggtggcgggcactgtcgtcat

SEQ ID NO: 4038 - DNA, 55 bp, Artificial Sequence
  Synthetic polynucleotide
tggtacagatggcactgacaatcccctttctggtggggatcagtatcagaacatc

SEQ ID NO: 4039 - DNA, 55 bp, Artificial Sequence
  Synthetic polynucleotide
gtgctaaaatgaggagctccaagaagactgaggtgaacctggaggcccctgagcc

SEQ ID NO: 4040 - DNA, 55 bp, Artificial Sequence
  Synthetic polynucleotide
agaaggcagcgaagaagacaaatcacaaactggtgtgaatagagccagcaaagga

SEQ ID NO: 4041 - DNA, 55 bp, Artificial Sequence
  Synthetic polynucleotide
ccgggcggagggggcgggaagagcgcgtcctggccaagccgagtagtgtcttcca

SEQ ID NO: 4042 - DNA, 55 bp, Artificial Sequence
  Synthetic polynucleotide
gaaattgttcctcgtctgataagacaacagtggagagtatgcatttatttattta

SEQ ID NO: 4043 - DNA, 55 bp, Artificial Sequence
  Synthetic polynucleotide
acaaactggtgtgaatagagccagcaaaggaggtcttatctatgggaactacctg

SEQ ID NO: 4044 - DNA, 55 bp, Artificial Sequence
  Synthetic polynucleotide
cacgcacgcagactcgcagacgccctctgctggaactgacacgcagacattcagc

SEQ ID NO: 4045 - DNA, 55 bp, Artificial Sequence
  Synthetic polynucleotide
catgcgtggattgtcgtcttctgtccaagttggtcgcttccctgcgccaaaggta

SEQ ID NO: 4046 - DNA, 55 bp, Artificial Sequence
  Synthetic polynucleotide
aggcgcagcagaggcgcagcagtgccacagcggctccgcctctgccgcctagttt

SEQ ID NO: 4047 - DNA, 55 bp, Artificial Sequence
  Synthetic polynucleotide
ctaggtgaacggccatggcgggctggatccaggcccagcagctgcagggagacgc

SEQ ID NO: 4048 - DNA, 55 bp, Artificial Sequence
  Synthetic polynucleotide
cctgtgtctggagccaagatggggctctgcaggacacttcctgccaagtccatgc

SEQ ID NO: 4049 - DNA, 55 bp, Artificial Sequence
  Synthetic polynucleotide
tttggaaagggggtggggggagtttgctcctggaccccctatttctgacctccca

SEQ ID NO: 4050 - DNA, 55 bp, Artificial Sequence
  Synthetic polynucleotide
aggtggcaccgccgaggctgctggaggaagtggccgagcagtgccacggccccat

SEQ ID NO: 4051 - DNA, 55 bp, Artificial Sequence
  Synthetic polynucleotide
cgccgccaatgcaaaactcaaccctaccccaggcagcaatgctatctcaggtttg

SEQ ID NO: 4052 - DNA, 55 bp, Artificial Sequence
  Synthetic polynucleotide
cagcaggtatgaatccatcttcctgacccttgggaccagccggggcagtgaagcg

SEQ ID NO: 4053 - DNA, 55 bp, Artificial Sequence
  Synthetic polynucleotide
gcatgaactgctaggtgatgatgtcagattcggttttactaacttctccaaaaat

SEQ ID NO: 4054 - DNA, 55 bp, Artificial Sequence
  Synthetic polynucleotide
gaccctgagggagcagagatgtgggaatgggggccgagccaattgtgatgtaagt

SEQ ID NO: 4055 - DNA, 55 bp, Artificial Sequence
  Synthetic polynucleotide
caggatcagggggactggggtcgggagggtggggcaggaaggaagccagaatcag

SEQ ID NO: 4056 - DNA, 55 bp, Artificial Sequence
  Synthetic polynucleotide
atttttgaatgagaaagctggagaagggggaggagtgatccaggtaaggtgggag

SEQ ID NO: 4057 - DNA, 55 bp, Artificial Sequence
  Synthetic polynucleotide
cttacctttggcgcagggaagcgaccaacttggacagaagacgacaatccacgca

SEQ ID NO: 4058 - DNA, 55 bp, Artificial Sequence
  Synthetic polynucleotide
cctcatggaagaagagggggagagagttacaggttggacatgatgcacactatgg

SEQ ID NO: 4059 - DNA, 55 bp, Artificial Sequence
  Synthetic polynucleotide
agatatcatggtggaagagtttgtggaagggggtcctctggatctcttcatgcac

SEQ ID NO: 4060 - DNA, 55 bp, Artificial Sequence
  Synthetic polynucleotide
gatgagttgcagttcccagctgcacgcctcgggaagcgccgcactctccttaggg

SEQ ID NO: 4061 - DNA, 55 bp, Artificial Sequence
  Synthetic polynucleotide
ggaaatgcaagaagagggaaacgtgtggcttggagtttcaagaagagtgactgtc

SEQ ID NO: 4062 - DNA, 55 bp, Artificial Sequence
  Synthetic polynucleotide
agcatgtccaggtgggtctcgggactggcagggagccgcagcttcatgtctgtgc

SEQ ID NO: 4063 - DNA, 55 bp, Artificial Sequence
  Synthetic polynucleotide
atcaggacgagaatgagggtcctttgggaaaggagaagttaagcaacatctagca

SEQ ID NO: 4064 - DNA, 55 bp, Artificial Sequence
  Synthetic polynucleotide
cccggtgattggtgggggcggaagggggccgggcgccagcgctgccttttctcct

SEQ ID NO: 4065 - DNA, 55 bp, Artificial Sequence
  Synthetic polynucleotide
ccgcgcgcagcggccagagaccgagccctaaggagagtgcggcgcttcccgaggc

SEQ ID NO: 4066 - DNA, 55 bp, Artificial Sequence
  Synthetic polynucleotide
cagcacactggttgtggcagcagtcactgggggacttgccacggcagcgcccgga

SEQ ID NO: 4067 - DNA, 55 bp, Artificial Sequence
  Synthetic polynucleotide
aactgttcaacaacagcagcagccacctggaggactacagtggcctgtccgtgtc

SEQ ID NO: 4068 - DNA, 55 bp, Artificial Sequence
  Synthetic polynucleotide
tggagcccctggagccagcccctggccttcaggacaaagcctgcaggtactggtg

SEQ ID NO: 4069 - DNA, 55 bp, Artificial Sequence
  Synthetic polynucleotide
ccctggttggtcccaaaggcggagggcgttaggagggaggctgggttgccgccgt

SEQ ID NO: 4070 - DNA, 55 bp, Artificial Sequence
  Synthetic polynucleotide
aggaagggcctgagtccgagcagaagaagaagggctcccatcacatcaaccggtg

SEQ ID NO: 4071 - DNA, 55 bp, Artificial Sequence
  Synthetic polynucleotide
ggaagggcctgagtccgagcagaagaagaagggctcccatcacatcaaccggtgg

SEQ ID NO: 4072 - DNA, 55 bp, Artificial Sequence
  Synthetic polynucleotide
ccttcttcgaggcagccagcatgatgagacaggtctcccacaaacacatcgtgta

SEQ ID NO: 4073 - DNA, 55 bp, Artificial Sequence
  Synthetic polynucleotide
tggttatcaccttctttgcttgttcaaatggggattctataccaggaatggagtt

SEQ ID NO: 4074 - DNA, 55 bp, Artificial Sequence
  Synthetic polynucleotide
gtctcaaggagcagggtgagtgtctcagcctggccgtgttggacctggcccggat

SEQ ID NO: 4075 - DNA, 55 bp, Artificial Sequence
  Synthetic polynucleotide
cccgagccaggaactgtgtgtgttgcaggggggcagtaactccccaactccctcg

SEQ ID NO: 4076 - DNA, 55 bp, Artificial Sequence
  Synthetic polynucleotide
aggccatggagggctgagagagggacaagtcggaaccattttaaagctcagcccc

SEQ ID NO: 4077 - DNA, 55 bp, Artificial Sequence
  Synthetic polynucleotide
agcagggacaaaaacgtttccaagacatgatgggccacggatctgactactcact

SEQ ID NO: 4078 - DNA, 55 bp, Artificial Sequence
  Synthetic polynucleotide
cgggcgcgtgccacgcccgcggggtgaagtcggagcgcggggcctgctggagaga

SEQ ID NO: 4079 - DNA, 55 bp, Artificial Sequence
  Synthetic polynucleotide
tgctgtgactgcttgcagatggccatggcgcggacgcgggtgccgggcgggggtg

SEQ ID NO: 4080 - DNA, 55 bp, Artificial Sequence
  Synthetic polynucleotide
atgacctgcagaagcgcctggcagtgtaccaggccggggcccgcgagggcgccga

SEQ ID NO: 4081 - DNA, 55 bp, Artificial Sequence
  Synthetic polynucleotide
ccccttggcagtcatcttagtcattacctgaggtgttcgttgtaactcatataaa

SEQ ID NO: 4082 - DNA, 55 bp, Artificial Sequence
  Synthetic polynucleotide
ttctcatctgtgcccctccctccctggcccaggtgaaggtgtggttccagaaccg

SEQ ID NO: 4083 - DNA, 55 bp, Artificial Sequence
  Synthetic polynucleotide
catgtctgacagagccccccctcaaagagagggtggaaggacacggggtttttcc

SEQ ID NO: 4084 - DNA, 55 bp, Artificial Sequence; identical to SEQ ID NO: 4071
  Synthetic polynucleotide

SEQ ID NO: 4085 - DNA, 55 bp, Artificial Sequence
  Synthetic polynucleotide
cgcacctcatggaatcccttctgcagcacctggatcgcttttccgagcttctggc

SEQ ID NO: 4086 - DNA, 55 bp, Artificial Sequence
  Synthetic polynucleotide
aaggaaactggaacacaaagcatagactgcggggcgggccagcctgaatagctgc

SEQ ID NO: 4087 - DNA, 55 bp, Artificial Sequence
  Synthetic polynucleotide
caatccttggggcccagactgagcacgtgatggcagaggaaaggaagccctgctt

SEQ ID NO: 4088 - DNA, 55 bp, Artificial Sequence
  Synthetic polynucleotide
gcgccccggtggcactgcggctggaggtgggggttaaagcggagactctggtgct

SEQ ID NO: 4089 - DNA, 55 bp, Artificial Sequence
  Synthetic polynucleotide
gcttttgtgcagcagcagcagcagcagcagcggcagcagcagcagtatagaggaa

SEQ ID NO: 4090 - DNA, 55 bp, Artificial Sequence
  Synthetic polynucleotide
tagttggccgatcagcagcagcagcagcagcggcagcagcagcagcttcaggttc

SEQ ID NO: 4091 - DNA, 55 bp, Artificial Sequence
  Synthetic polynucleotide
gttaaaatccagcagcagcagcagcagcagcggcagcagcagcagcagttgttat

SEQ ID NO: 4092 - DNA, 55 bp, Artificial Sequence
  Synthetic polynucleotide
taatggcagcagcagcagcagcagcagcagcggcagcagcagcagcagcagtcgt

SEQ ID NO: 4093 - DNA, 55 bp, Artificial Sequence
  Synthetic polynucleotide
aactccccgcgtccctcttgacagcagcagcggcagcagcagtggatcacgcatg

SEQ ID NO: 4094 - DNA, 55 bp, Artificial Sequence
  Synthetic polynucleotide
ttgtggtttacactggacatggaaatagagaggagcaaaatctgtccgatctact

SEQ ID NO: 4095 - DNA, 55 bp, Artificial Sequence
  Synthetic polynucleotide
caagcttgttgcaaatacgctatctgtagcaggtgcagatcatattatcaccatg

SEQ ID NO: 4096 - DNA, 55 bp, Artificial Sequence
  Synthetic polynucleotide
aggtcttcaagcttttcttcaagctgcccaaggtcttttatttgagcttcaattt

SEQ ID NO: 4097 - DNA, 55 bp, Artificial Sequence
  Synthetic polynucleotide
gattggaccaaaggaacgtgttttacccggaggagagactgctggagacatgggg

SEQ ID NO: 4098 - DNA, 55 bp, Artificial Sequence
  Synthetic polynucleotide
gaagatgctgcctgtgcgtcccccaggggcaggggggctgcctcctccacaagtg

SEQ ID NO: 4099 - DNA, 55 bp, Artificial Sequence
  Synthetic polynucleotide
tcaaattagacttaggcaagtaatgcaatatggtagactggggagaactacaaac

SEQ ID NO: 4100 - DNA, 55 bp, Artificial Sequence
  Synthetic polynucleotide
gtggctcaaaggataacatcaaacacgtcccgggaggcggcagtgtgagtacctt

SEQ ID NO: 4101 - DNA, 55 bp, Artificial Sequence
  Synthetic polynucleotide
acgcgcggactgcgactgcagaagatgacctgggagggctcgcgcgagttcaccg

SEQ ID NO: 4102 - DNA, 55 bp, Artificial Sequence
  Synthetic polynucleotide
aaactcatcctgagtacgcataagcgacgaaggtcatcaacaccaattccagcag

SEQ ID NO: 4103 - DNA, 55 bp, Artificial Sequence
  Synthetic polynucleotide
cccaagggctacaaggcgagcgtgggctgctgggaggggggagttctgcccccac

SEQ ID NO: 4104 - DNA, 55 bp, Artificial Sequence
  Synthetic polynucleotide
tgctcattggctgtgagcgtgcccaggggcgggcggcggggagagcccacggtgg

SEQ ID NO: 4105 - DNA, 55 bp, Artificial Sequence
  Synthetic polynucleotide
ccagacctgggccagacactttgtgaagtaagggatcagcaaggatgtgggatca

SEQ ID NO: 4106 - DNA, 55 bp, Artificial Sequence
  Synthetic polynucleotide
caagccagccatatagacgcctctgctcccaggagagcttcactgaaggacttca

SEQ ID NO: 4107 - DNA, 55 bp, Artificial Sequence
  Synthetic polynucleotide
tgtcttacagacttttacagtattgaataaagggaaggccatcttccggttcagt

SEQ ID NO: 4108 - DNA, 55 bp, Artificial Sequence
  Synthetic polynucleotide
gctttcacacacatacatccctctggacattggctgcaagtggggtaaaagaaag

SEQ ID NO: 4109 - DNA, 55 bp, Artificial Sequence; identical to SEQ ID NO: 4108
  Synthetic polynucleotide

SEQ ID NO: 4110 - DNA, 55 bp, Artificial Sequence
  Synthetic polynucleotide
cctgaaatgactgatacagttttcagggcccggaggactcggaaggtgcgtaagg

SEQ ID NO: 4111 - DNA, 55 bp, Artificial Sequence
  Synthetic polynucleotide
gcggaaacgctctttactgtttaagccaacaggctttggttctttagaaggactt

SEQ ID NO: 4112 - DNA, 55 bp, Artificial Sequence
  Synthetic polynucleotide
aagagaagatacttacagcttcttgtctccaggtctgtaggtttttctttaaatt

SEQ ID NO: 4113 - DNA, 55 bp, Artificial Sequence
  Synthetic polynucleotide
agagttgtgctgatggcagttaatgagctcagggatggtgctgaaaaggtgcttc

SEQ ID NO: 4114 - DNA, 55 bp, Artificial Sequence
  Synthetic polynucleotide
aacaaaagacaaatgcttcctgtacacctgtggcagtcaggaattccagagtgta

SEQ ID NO: 4115 - DNA, 55 bp, Artificial Sequence
  Synthetic polynucleotide
atcttattgtgctgatcttcagcctccttttggggatggaacttcaacgcttctt

SEQ ID NO: 4116 - DNA, 55 bp, Artificial Sequence
  Synthetic polynucleotide
tcccggccctgtggttcggcatcatagtgctgggtcaggaagtgtgtgtacctgg

SEQ ID NO: 4117 - DNA, 20 bp, Artificial Sequence
  Synthetic polynucleotide
gtcgccgaccgcggcggcgg

SEQ ID NO: 4118 - DNA, 20 bp, Artificial Sequence
  Synthetic polynucleotide
gcgtagtactgaggaggagg

SEQ ID NO: 4119 - DNA, 20 bp, Artificial Sequence
  Synthetic polynucleotide
tgcctactcgggggcggggc

SEQ ID NO: 4120 - DNA, 20 bp, Artificial Sequence
  Synthetic polynucleotide
tgagtccccgcggcgcggcg

SEQ ID NO: 4121 - DNA, 20 bp, Artificial Sequence
  Synthetic polynucleotide
cgcgcgcgcgcgcgcgcgcg

SEQ ID NO: 4122 - DNA, 20 bp, Artificial Sequence
  Synthetic polynucleotide
agcagcagcagcagcagcag

SEQ ID NO: 4123 - DNA, 20 bp, Artificial Sequence
  Synthetic polynucleotide
aagaagaagaagaagaagaa

SEQ ID NO: 4124 - DNA, 20 bp, Artificial Sequence
  Synthetic polynucleotide
agcgagcgagcgagcgagcg

SEQ ID NO: 4125 - DNA, 20 bp, Artificial Sequence
  Synthetic polynucleotide
gctaatttcgcgcgcgcgcg

SEQ ID NO: 4126 - DNA, 20 bp, Artificial Sequence
  Synthetic polynucleotide
tttcctttcagcagcagcag

SEQ ID NO: 4127 - DNA, 20 bp, Artificial Sequence
  Synthetic polynucleotide
ggacctttgaagaagaagaa

SEQ ID NO: 4128 - DNA, 20 bp, Artificial Sequence
  Synthetic polynucleotide
tagtttttcggcggcggcgg

SEQ ID NO: 4129 - DNA, 20 bp, Artificial Sequence
  Synthetic polynucleotide
tcgattttaggaggaggagg

SEQ ID NO: 4130 - DNA, 20 bp, Artificial Sequence
  Synthetic polynucleotide
atacttttagcgagcgagcg

SEQ ID NO: 4131 - DNA, 20 bp, Artificial Sequence
  Synthetic polynucleotide
cgcgttttttggggcggggc

SEQ ID NO: 4132 - DNA, 20 bp, Artificial Sequence
  Synthetic polynucleotide
atcaatttttcgcggcgcgg

SEQ ID NO: 4133 - DNA, 20 bp, Artificial Sequence
  Synthetic polynucleotide
cacagcgctggtgtggcgtg

SEQ ID NO: 4134 - DNA, 20 bp, Artificial Sequence
  Synthetic polynucleotide
atgccgttgcgacggcccga

SEQ ID NO: 4135 - DNA, 20 bp, Artificial Sequence
  Synthetic polynucleotide
ggattccagatggggttgat

SEQ ID NO: 4136 - DNA, 20 bp, Artificial Sequence
  Synthetic polynucleotide
taacgatatggggggttatg

SEQ ID NO: 4137 - DNA, 20 bp, Artificial Sequence
  Synthetic polynucleotide
cgccattaaggggtacctaa

SEQ ID NO: 4138 - DNA, 20 bp, Artificial Sequence
  Synthetic polynucleotide
ccgcgctgtggacggccctg

SEQ ID NO: 4139 - DNA, 20 bp, Artificial Sequence
  Synthetic polynucleotide
gcctggttggggtgtacggt

SEQ ID NO: 4140 - DNA, 20 bp, Artificial Sequence
  Synthetic polynucleotide
gattacggggcaatgagtac

SEQ ID NO: 4141 - DNA, 20 bp, Artificial Sequence
  Synthetic polynucleotide
agtgcaggttacattcgtgc

SEQ ID NO: 4142 - DNA, 20 bp, Artificial Sequence
  Synthetic polynucleotide
ttgtgggccagaccttttgt

SEQ ID NO: 4143 - DNA, 20 bp, Artificial Sequence
  Synthetic polynucleotide
tgacggctcatcctgtatga

SEQ ID NO: 4144 - DNA, 20 bp, Artificial Sequence
  Synthetic polynucleotide
ctcggctatatacggagtct

SEQ ID NO: 4145 - DNA, 20 bp, Artificial Sequence
  Synthetic polynucleotide
cgggaagcccgacataccac

SEQ ID NO: 4146 - DNA, 20 bp, Artificial Sequence
  Synthetic polynucleotide
tggacgttttttgcgggcac

SEQ ID NO: 4147 - DNA, 20 bp, Artificial Sequence
  Synthetic polynucleotide
gggcagaatcggtatgacag

SEQ ID NO: 4148 - DNA, 20 bp, Artificial Sequence
  Synthetic polynucleotide
gtcttcaaccaaagagtaca

SEQ ID NO: 4149 - DNA, 20 bp, Artificial Sequence
  Synthetic polynucleotide
aaggcagtatgatacgctgc

SEQ ID NO: 4150 - DNA, 20 bp, Artificial Sequence
  Synthetic polynucleotide
aacccatcctggcctgaaat

SEQ ID NO: 4151 - DNA, 20 bp, Artificial Sequence
  Synthetic polynucleotide
ttcaaacgagttttttttga

SEQ ID NO: 4152 - DNA, 20 bp, Artificial Sequence
  Synthetic polynucleotide
cctatatgtggagaggcgag

SEQ ID NO: 4153 - DNA, 20 bp, Artificial Sequence
  Synthetic polynucleotide
taacggacacgttggggcgt

SEQ ID NO: 4154 - DNA, 20 bp, Artificial Sequence
  Synthetic polynucleotide
cagttccttatcgggactat

SEQ ID NO: 4155 - DNA, 20 bp, Artificial Sequence
  Synthetic polynucleotide
acccaggcctcggttggcct

SEQ ID NO: 4156 - DNA, 20 bp, Artificial Sequence
  Synthetic polynucleotide
acagtcagaaggaagtaaga

SEQ ID NO: 4157 - DNA, 20 bp, Artificial Sequence
  Synthetic polynucleotide
tatgaataaggcgacttata

SEQ ID NO: 4158 - DNA, 20 bp, Artificial Sequence
  Synthetic polynucleotide
ggaagtgtgggctcaaagtg

SEQ ID NO: 4159 - DNA, 20 bp, Artificial Sequence
  Synthetic polynucleotide
cacgcgcgggccgtccggcg

SEQ ID NO: 4160 - DNA, 20 bp, Artificial Sequence
  Synthetic polynucleotide
acttgtggcgtagtgatttg

SEQ ID NO: 4161 - DNA, 20 bp, Artificial Sequence
  Synthetic polynucleotide
cttgtggagagttaggcttg

SEQ ID NO: 4162 - DNA, 20 bp, Artificial Sequence
  Synthetic polynucleotide
ttcgggtactatggcggttc

SEQ ID NO: 4163 - DNA, 20 bp, Artificial Sequence
  Synthetic polynucleotide
ccgggggctagggctatccc

SEQ ID NO: 4164 - DNA, 20 bp, Artificial Sequence
  Synthetic polynucleotide
taggatcgtgcacgcgaggt

SEQ ID NO: 4165 - DNA, 20 bp, Artificial Sequence
  Synthetic polynucleotide
gggtatctttagtacctcgt

SEQ ID NO: 4166 - DNA, 20 bp, Artificial Sequence
  Synthetic polynucleotide
ggccagaaaactccgggaac

SEQ ID NO: 4167 - DNA, 20 bp, Artificial Sequence
  Synthetic polynucleotide
gagtaaatggactcctgcgc

SEQ ID NO: 4168 - DNA, 20 bp, Artificial Sequence
  Synthetic polynucleotide
attcgcacagtggtattgaa

SEQ ID NO: 4169 - DNA, 20 bp, Artificial Sequence
  Synthetic polynucleotide
ctcggttagtgtaaaactac

SEQ ID NO: 4170 - DNA, 20 bp, Artificial Sequence
  Synthetic polynucleotide
aaactgaaccagccccgagt

SEQ ID NO: 4171 - DNA, 20 bp, Artificial Sequence
  Synthetic polynucleotide
ggaacgtgcctaagggttaa

SEQ ID NO: 4172 - DNA, 20 bp, Artificial Sequence
  Synthetic polynucleotide
cttagccggtgcgggcctgc

SEQ ID NO: 4173 - DNA, 20 bp, Artificial Sequence
  Synthetic polynucleotide
taagatgaactaggagaact

SEQ ID NO: 4174 - DNA, 20 bp, Artificial Sequence
  Synthetic polynucleotide
cgggcttttgagggcgtttg

SEQ ID NO: 4175 - DNA, 20 bp, Artificial Sequence
  Synthetic polynucleotide
cgctttccatgggacggcca

SEQ ID NO: 4176 - DNA, 20 bp, Artificial Sequence
  Synthetic polynucleotide
ccaacctcagggctgacctc

SEQ ID NO: 4177 - DNA, 20 bp, Artificial Sequence
  Synthetic polynucleotide
tttcttaaggcgtgccttta

SEQ ID NO: 4178 - DNA, 20 bp, Artificial Sequence
  Synthetic polynucleotide
ccctcaaggtatcggtatca

SEQ ID NO: 4179 - DNA, 20 bp, Artificial Sequence
  Synthetic polynucleotide
tagccggggtcctagacgcc

SEQ ID NO: 4180 - DNA, 20 bp, Artificial Sequence
  Synthetic polynucleotide
tctctggaacgaagcctctc

SEQ ID NO: 4181 - DNA, 20 bp, Artificial Sequence
  Synthetic polynucleotide
tccgggctagcctcagatcc

SEQ ID NO: 4182 - DNA, 20 bp, Artificial Sequence
  Synthetic polynucleotide
tctgggactttattgagctc

SEQ ID NO: 4183 - DNA, 20 bp, Artificial Sequence
  Synthetic polynucleotide
ggggagtcgtttagcgcgtg

SEQ ID NO: 4184 - DNA, 20 bp, Artificial Sequence
  Synthetic polynucleotide
aggcgtgccagatagcccgg

SEQ ID NO: 4185 - DNA, 20 bp, Artificial Sequence
  Synthetic polynucleotide
gggcgttctgaaatggaaga

SEQ ID NO: 4186 - DNA, 20 bp, Artificial Sequence
  Synthetic polynucleotide
gaaatacgggcaagcgcgta

SEQ ID NO: 4187 - DNA, 20 bp, Artificial Sequence
  Synthetic polynucleotide
aggcgttgagtggttgttgt

SEQ ID NO: 4188 - DNA, 20 bp, Artificial Sequence
  Synthetic polynucleotide
tacgtggctgcggaattgac

SEQ ID NO: 4189 - DNA, 20 bp, Artificial Sequence
  Synthetic polynucleotide
gaacttcgcgtcaaaatcaa

SEQ ID NO: 4190 - DNA, 20 bp, Artificial Sequence
  Synthetic polynucleotide
tgacgggataatgtgaaaac

SEQ ID NO: 4191 - DNA, 20 bp, Artificial Sequence
  Synthetic polynucleotide
tgacgggataatgtgccccc

SEQ ID NO: 4192 - DNA, 20 bp, Artificial Sequence
  Synthetic polynucleotide
tgacgggataatgtgggggc

SEQ ID NO: 4193 - DNA, 20 bp, Artificial Sequence
  Synthetic polynucleotide
tgacgggataatgtgttttc

SEQ ID NO: 4194 - DNA, 20 bp, Artificial Sequence
  Synthetic polynucleotide
tgacgggataatgtgacacc

SEQ ID NO: 4195 - DNA, 20 bp, Artificial Sequence
  Synthetic polynucleotide
tgacgggataatgtgagagc

SEQ ID NO: 4196 - DNA, 20 bp, Artificial Sequence
  Synthetic polynucleotide
tgacgggataatgtgatatc

SEQ ID NO: 4197 - DNA, 20 bp, Artificial Sequence
  Synthetic polynucleotide
tgacgggataatgtgcacac

SEQ ID NO: 4198 - DNA, 20 bp, Artificial Sequence
  Synthetic polynucleotide
tgacgggataatgtgcgcgc

SEQ ID NO: 4199 - DNA, 20 bp, Artificial Sequence
  Synthetic polynucleotide
tgacgggataatgtgctctc

SEQ ID NO: 4200 - DNA, 20 bp, Artificial Sequence
  Synthetic polynucleotide
tgacgggataatgtggagac

SEQ ID NO: 4201 - DNA, 20 bp, Artificial Sequence
  Synthetic polynucleotide
tgacgggataatgtggcgcc

SEQ ID NO: 4202 - DNA, 20 bp, Artificial Sequence
  Synthetic polynucleotide
tgacgggataatgtggtgtc

SEQ ID NO: 4203 - DNA, 20 bp, Artificial Sequence
  Synthetic polynucleotide
tgacgggataatgtgtatac

SEQ ID NO: 4204 - DNA, 20 bp, Artificial Sequence
  Synthetic polynucleotide
tgacgggataatgtgtctcc

SEQ ID NO: 4205 - DNA, 20 bp, Artificial Sequence
  Synthetic polynucleotide
tgacgggataatgtgtgtgc

SEQ ID NO: 4206 - DNA, 20 bp, Artificial Sequence
  Synthetic polynucleotide
tgacgggataatgtgatagc

SEQ ID NO: 4207 - DNA, 20 bp, Artificial Sequence
  Synthetic polynucleotide
tgacgggataatgtgacatc

SEQ ID NO: 4208 - DNA, 20 bp, Artificial Sequence
  Synthetic polynucleotide
tgacgggataatgtgagatc

SEQ ID NO: 4209 - DNA, 20 bp, Artificial Sequence
  Synthetic polynucleotide
tgacgggataatgtgagacc

SEQ ID NO: 4210 - DNA, 20 bp, Artificial Sequence
  Synthetic polynucleotide
tgacgggataatgtgatacc

SEQ ID NO: 4211 - DNA, 20 bp, Artificial Sequence
  Synthetic polynucleotide
tgacgggataatgtgcgctc

SEQ ID NO: 4212 - DNA, 20 bp, Artificial Sequence
  Synthetic polynucleotide
tgacgggataatgtgcacgc

SEQ ID NO: 4213 - DNA, 20 bp, Artificial Sequence
  Synthetic polynucleotide
tgacgggataatgtgctcgc

SEQ ID NO: 4214 - DNA, 20 bp, Artificial Sequence
  Synthetic polynucleotide
tgacgggataatgtgctcac

SEQ ID NO: 4215 - DNA, 20 bp, Artificial Sequence
  Synthetic polynucleotide
tgacgggataatgtgcactc

SEQ ID NO: 4216 - DNA, 20 bp, Artificial Sequence
  Synthetic polynucleotide
tgacgggataatgtggcgtc

SEQ ID NO: 4217 - DNA, 20 bp, Artificial Sequence
  Synthetic polynucleotide
tgacgggataatgtggagcc

SEQ ID NO: 4218 - DNA, 20 bp, Artificial Sequence
  Synthetic polynucleotide
tgacgggataatgtggtgcc

SEQ ID NO: 4219 - DNA, 20 bp, Artificial Sequence
  Synthetic polynucleotide
tgacgggataatgtggagtc

SEQ ID NO: 4220 - DNA, 20 bp, Artificial Sequence
  Synthetic polynucleotide
tgacgggataatgtggtgac

SEQ ID NO: 4221 - DNA, 20 bp, Artificial Sequence
  Synthetic polynucleotide
tgacgggataatgtgtatcc

SEQ ID NO: 4222 - DNA, 20 bp, Artificial Sequence
  Synthetic polynucleotide
tgacgggataatgtgtctac

SEQ ID NO: 4223 - DNA, 20 bp, Artificial Sequence
  Synthetic polynucleotide
tgacgggataatgtgtgtcc

SEQ ID NO: 4224 - DNA, 20 bp, Artificial Sequence
  Synthetic polynucleotide
tgacgggataatgtgtgtac

SEQ ID NO: 4225 - DNA, 20 bp, Artificial Sequence
  Synthetic polynucleotide
tgacgggataatgtgtatgc

SEQ ID NO: 4226 - DNA, 20 bp, Artificial Sequence
  Synthetic polynucleotide
tgacgggataatgtgtagac

SEQ ID NO: 4227 - DNA, 20 bp, Artificial Sequence
  Synthetic polynucleotide
tgacgggataatgtgtacac

SEQ ID NO: 4228 - DNA, 20 bp, Artificial Sequence
  Synthetic polynucleotide
tgacgggataatgtggacac

SEQ ID NO: 4229 - DNA, 20 bp, Artificial Sequence
  Synthetic polynucleotide
tgacgggataatgtgcagac

SEQ ID NO: 4230 - DNA, 20 bp, Artificial Sequence
  Synthetic polynucleotide
tgacgggataatgtggatac

SEQ ID NO: 4231 - DNA, 20 bp, Artificial Sequence
  Synthetic polynucleotide
tgacgggataatgtgacgcc

SEQ ID NO: 4232 - DNA, 20 bp, Artificial Sequence
  Synthetic polynucleotide
tgacgggataatgtgtcacc

SEQ ID NO: 4233 - DNA, 20 bp, Artificial Sequence
  Synthetic polynucleotide
tgacgggataatgtggcacc

SEQ ID NO: 4234 - DNA, 20 bp, Artificial Sequence
  Synthetic polynucleotide
tgacgggataatgtggctcc

SEQ ID NO: 4235 - DNA, 20 bp, Artificial Sequence
  Synthetic polynucleotide
tgacgggataatgtgtcgcc

SEQ ID NO: 4236 - DNA, 20 bp, Artificial Sequence
  Synthetic polynucleotide
tgacgggataatgtgcgagc

SEQ ID NO: 4237 - DNA, 20 bp, Artificial Sequence
  Synthetic polynucleotide
tgacgggataatgtgagcgc

SEQ ID NO: 4238 - DNA, 20 bp, Artificial Sequence
  Synthetic polynucleotide
tgacgggataatgtgagtgc

SEQ ID NO: 4239 - DNA, 20 bp, Artificial Sequence
  Synthetic polynucleotide
tgacgggataatgtgtgagc

SEQ ID NO: 4240 - DNA, 20 bp, Artificial Sequence
  Synthetic polynucleotide
tgacgggataatgtgtgcgc

SEQ ID NO: 4241 - DNA, 20 bp, Artificial Sequence
  Synthetic polynucleotide
tgacgggataatgtggtctc

SEQ ID NO: 4242 - DNA, 20 bp, Artificial Sequence
  Synthetic polynucleotide
tgacgggataatgtgctatc

SEQ ID NO: 4243 - DNA, 20 bp, Artificial Sequence
  Synthetic polynucleotide
tgacgggataatgtgatgtc

SEQ ID NO: 4244 - DNA, 20 bp, Artificial Sequence
  Synthetic polynucleotide
tgacgggataatgtgctgtc

SEQ ID NO: 4245 - DNA, 20 bp, Artificial Sequence
  Synthetic polynucleotide
tgacgggataatgtgatctc

SEQ ID NO: 4246 - DNA, 20 bp, Artificial Sequence
  Synthetic polynucleotide
tgacgggataatgtgacgtc

SEQ ID NO: 4247 - DNA, 20 bp, Artificial Sequence
  Synthetic polynucleotide
tgacgggataatgtgactac

SEQ ID NO: 4248 - DNA, 20 bp, Artificial Sequence
  Synthetic polynucleotide
tgacgggataatgtgagtac

SEQ ID NO: 4249 - DNA, 20 bp, Artificial Sequence
  Synthetic polynucleotide
tgacgggataatgtgactgc

SEQ ID NO: 4250 - DNA, 20 bp, Artificial Sequence
  Synthetic polynucleotide
tgacgggataatgtgatcgc

SEQ ID NO: 4251 - DNA, 20 bp, Artificial Sequence
  Synthetic polynucleotide
tgacgggataatgtgctgac

SEQ ID NO: 4252 - DNA, 20 bp, Artificial Sequence
  Synthetic polynucleotide
tgacgggataatgtgcgtac

SEQ ID NO: 4253 - DNA, 20 bp, Artificial Sequence
  Synthetic polynucleotide
tgacgggataatgtgcatgc

SEQ ID NO: 4254 - DNA, 20 bp, Artificial Sequence
  Synthetic polynucleotide
tgacgggataatgtgctacc

SEQ ID NO: 4255 - DNA, 20 bp, Artificial Sequence
  Synthetic polynucleotide
tgacgggataatgtgcgacc

SEQ ID NO: 4256 - DNA, 20 bp, Artificial Sequence
  Synthetic polynucleotide
tgacgggataatgtggtacc

SEQ ID NO: 4257 - DNA, 20 bp, Artificial Sequence
  Synthetic polynucleotide
tgacgggataatgtggatgc

SEQ ID NO: 4258 - DNA, 20 bp, Artificial Sequence
  Synthetic polynucleotide
tgacgggataatgtggactc

SEQ ID NO: 4259 - DNA, 20 bp, Artificial Sequence
  Synthetic polynucleotide
tgacgggataatgtggctac

SEQ ID NO: 4260 - DNA, 20 bp, Artificial Sequence
  Synthetic polynucleotide
tgacgggataatgtggtcgc

SEQ ID NO: 4261 - DNA, 20 bp, Artificial Sequence
  Synthetic polynucleotide
tgacgggataatgtgtagcc

SEQ ID NO: 4262 - DNA, 20 bp, Artificial Sequence
  Synthetic polynucleotide
tgacgggataatgtgtgacc

SEQ ID NO: 4263 - DNA, 20 bp, Artificial Sequence
  Synthetic polynucleotide
tgacgggataatgtgtgcac

SEQ ID NO: 4264 - DNA, 20 bp, Artificial Sequence
  Synthetic polynucleotide
tgacgggataatgtgtcgtc

SEQ ID NO: 4265 - DNA, 20 bp, Artificial Sequence
  Synthetic polynucleotide
tgacgggataatgtgtcgac

SEQ ID NO: 4266 - DNA, 20 bp, Artificial Sequence
  Synthetic polynucleotide
cgcgaaccgaaatcgaaaac

SEQ ID NO: 4267 - DNA, 20 bp, Artificial Sequence
  Synthetic polynucleotide
cgcgaaccgaaatcgccccc

SEQ ID NO: 4268 - DNA, 20 bp, Artificial Sequence
  Synthetic polynucleotide
cgcgaaccgaaatcgggggc

SEQ ID NO: 4269 - DNA, 20 bp, Artificial Sequence
  Synthetic polynucleotide
cgcgaaccgaaatcgttttc

SEQ ID NO: 4270 - DNA, 20 bp, Artificial Sequence
  Synthetic polynucleotide
cgcgaaccgaaatcgacacc

SEQ ID NO: 4271 - DNA, 20 bp, Artificial Sequence
  Synthetic polynucleotide
cgcgaaccgaaatcgagagc

SEQ ID NO: 4272 - DNA, 20 bp, Artificial Sequence
  Synthetic polynucleotide
cgcgaaccgaaatcgatatc

SEQ ID NO: 4273 - DNA, 20 bp, Artificial Sequence
  Synthetic polynucleotide
cgcgaaccgaaatcgcacac

SEQ ID NO: 4274 - DNA, 20 bp, Artificial Sequence
  Synthetic polynucleotide
cgcgaaccgaaatcgcgcgc

SEQ ID NO: 4275 - DNA, 20 bp, Artificial Sequence
  Synthetic polynucleotide
cgcgaaccgaaatcgctctc

SEQ ID NO: 4276 - DNA, 20 bp, Artificial Sequence
  Synthetic polynucleotide
cgcgaaccgaaatcggagac

SEQ ID NO: 4277 - DNA, 20 bp, Artificial Sequence
  Synthetic polynucleotide
cgcgaaccgaaatcggcgcc

SEQ ID NO: 4278 - DNA, 20 bp, Artificial Sequence
  Synthetic polynucleotide
cgcgaaccgaaatcggtgtc

SEQ ID NO: 4279 - DNA, 20 bp, Artificial Sequence
  Synthetic polynucleotide
cgcgaaccgaaatcgtatac

SEQ ID NO: 4280 - DNA, 20 bp, Artificial Sequence
  Synthetic polynucleotide
cgcgaaccgaaatcgtctcc

SEQ ID NO: 4281 - DNA, 20 bp, Artificial Sequence
  Synthetic polynucleotide
cgcgaaccgaaatcgtgtgc

SEQ ID NO: 4282 - DNA, 20 bp, Artificial Sequence
  Synthetic polynucleotide
cgcgaaccgaaatcgacatc

SEQ ID NO: 4283 - DNA, 20 bp, Artificial Sequence
  Synthetic polynucleotide
cgcgaaccgaaatcgatagc

SEQ ID NO: 4284 - DNA, 20 bp, Artificial Sequence
  Synthetic polynucleotide
cgcgaaccgaaatcgacagc

SEQ ID NO: 4285 - DNA, 20 bp, Artificial Sequence
  Synthetic polynucleotide
cgcgaaccgaaatcgatacc

SEQ ID NO: 4286 - DNA, 20 bp, Artificial Sequence
  Synthetic polynucleotide
cgcgaaccgaaatcgagatc

SEQ ID NO: 4287 - DNA, 20 bp, Artificial Sequence
  Synthetic polynucleotide
cgcgaaccgaaatcgcgctc

SEQ ID NO: 4288 - DNA, 20 bp, Artificial Sequence
  Synthetic polynucleotide
cgcgaaccgaaatcgcacgc

SEQ ID NO: 4289 - DNA, 20 bp, Artificial Sequence
  Synthetic polynucleotide
cgcgaaccgaaatcgctcac

SEQ ID NO: 4290 - DNA, 20 bp, Artificial Sequence
  Synthetic polynucleotide
cgcgaaccgaaatcgcactc

SEQ ID NO: 4291 - DNA, 20 bp, Artificial Sequence
  Synthetic polynucleotide
cgcgaaccgaaatcgcgcac

SEQ ID NO: 4292 - DNA, 20 bp, Artificial Sequence
  Synthetic polynucleotide
cgcgaaccgaaatcggtgcc

SEQ ID NO: 4293 - DNA, 20 bp, Artificial Sequence
  Synthetic polynucleotide
cgcgaaccgaaatcggtgac

SEQ ID NO: 4294 - DNA, 20 bp, Artificial Sequence
  Synthetic polynucleotide
cgcgaaccgaaatcggcgac

SEQ ID NO: 4295 - DNA, 20 bp, Artificial Sequence
  Synthetic polynucleotide
cgcgaaccgaaatcggcgtc

SEQ ID NO: 4296 - DNA, 20 bp, Artificial Sequence
  Synthetic polynucleotide
cgcgaaccgaaatcggagcc

SEQ ID NO: 4297 - DNA, 20 bp, Artificial Sequence
  Synthetic polynucleotide
cgcgaaccgaaatcgtgtac

SEQ ID NO: 4298 - DNA, 20 bp, Artificial Sequence
  Synthetic polynucleotide
cgcgaaccgaaatcgtatgc

SEQ ID NO: 4299 - DNA, 20 bp, Artificial Sequence
  Synthetic polynucleotide
cgcgaaccgaaatcgtatcc

SEQ ID NO: 4300 - DNA, 20 bp, Artificial Sequence
  Synthetic polynucleotide
cgcgaaccgaaatcgtctac

SEQ ID NO: 4301 - DNA, 20 bp, Artificial Sequence
  Synthetic polynucleotide
cgcgaaccgaaatcgtgtcc

SEQ ID NO: 4302 - DNA, 20 bp, Artificial Sequence
  Synthetic polynucleotide
cgcgaaccgaaatcgtagac

SEQ ID NO: 4303 - DNA, 20 bp, Artificial Sequence
  Synthetic polynucleotide
cgcgaaccgaaatcggatac

SEQ ID NO: 4304 - DNA, 20 bp, Artificial Sequence
  Synthetic polynucleotide
cgcgaaccgaaatcgcagac

SEQ ID NO: 4305 - DNA, 20 bp, Artificial Sequence
  Synthetic polynucleotide
cgcgaaccgaaatcggacac

SEQ ID NO: 4306 - DNA, 20 bp, Artificial Sequence
  Synthetic polynucleotide
cgcgaaccgaaatcgtacac

SEQ ID NO: 4307 - DNA, 20 bp, Artificial Sequence
  Synthetic polynucleotide
cgcgaaccgaaatcggcacc

SEQ ID NO: 4308 - DNA, 20 bp, Artificial Sequence
  Synthetic polynucleotide
cgcgaaccgaaatcgtcacc

SEQ ID NO: 4309 - DNA, 20 bp, Artificial Sequence
  Synthetic polynucleotide
cgcgaaccgaaatcgactcc

SEQ ID NO: 4310 - DNA, 20 bp, Artificial Sequence
  Synthetic polynucleotide
cgcgaaccgaaatcggctcc

SEQ ID NO: 4311 - DNA, 20 bp, Artificial Sequence
  Synthetic polynucleotide
cgcgaaccgaaatcgtcgcc

SEQ ID NO: 4312 - DNA, 20 bp, Artificial Sequence
  Synthetic polynucleotide
cgcgaaccgaaatcgtgagc

SEQ ID NO: 4313 - DNA, 20 bp, Artificial Sequence
  Synthetic polynucleotide
cgcgaaccgaaatcgagtgc

SEQ ID NO: 4314 - DNA, 20 bp, Artificial Sequence
  Synthetic polynucleotide
cgcgaaccgaaatcgtgcgc

SEQ ID NO: 4315 - DNA, 20 bp, Artificial Sequence
  Synthetic polynucleotide
cgcgaaccgaaatcgagcgc

SEQ ID NO: 4316 - DNA, 20 bp, Artificial Sequence
  Synthetic polynucleotide
cgcgaaccgaaatcgcgtgc

SEQ ID NO: 4317 - DNA, 20 bp, Artificial Sequence
  Synthetic polynucleotide
cgcgaaccgaaatcgctgtc

SEQ ID NO: 4318 - DNA, 20 bp, Artificial Sequence
  Synthetic polynucleotide
cgcgaaccgaaatcggtatc

SEQ ID NO: 4319 - DNA, 20 bp, Artificial Sequence
  Synthetic polynucleotide
cgcgaaccgaaatcgatctc

SEQ ID NO: 4320 - DNA, 20 bp, Artificial Sequence
  Synthetic polynucleotide
cgcgaaccgaaatcggtctc

SEQ ID NO: 4321 - DNA, 20 bp, Artificial Sequence
  Synthetic polynucleotide
cgcgaaccgaaatcgatgtc

SEQ ID NO: 4322 - DNA, 20 bp, Artificial Sequence
  Synthetic polynucleotide
cgcgaaccgaaatcgagtcc

SEQ ID NO: 4323 - DNA, 20 bp, Artificial Sequence
  Synthetic polynucleotide
cgcgaaccgaaatcgatgcc

SEQ ID NO: 4324 - DNA, 20 bp, Artificial Sequence
  Synthetic polynucleotide
cgcgaaccgaaatcgatcgc

SEQ ID NO: 4325 - DNA, 20 bp, Artificial Sequence
  Synthetic polynucleotide
cgcgaaccgaaatcgagtac

SEQ ID NO: 4326 - DNA, 20 bp, Artificial Sequence
  Synthetic polynucleotide
cgcgaaccgaaatcgactac

SEQ ID NO: 4327 - DNA, 20 bp, Artificial Sequence
  Synthetic polynucleotide
cgcgaaccgaaatcgcatcc

SEQ ID NO: 4328 - DNA, 20 bp, Artificial Sequence
  Synthetic polynucleotide
cgcgaaccgaaatcgctagc

SEQ ID NO: 4329 - DNA, 20 bp, Artificial Sequence
  Synthetic polynucleotide
cgcgaaccgaaatcgcgatc

SEQ ID NO: 4330 - DNA, 20 bp, Artificial Sequence
  Synthetic polynucleotide
cgcgaaccgaaatcgcgtcc

SEQ ID NO: 4331 - DNA, 20 bp, Artificial Sequence
  Synthetic polynucleotide
cgcgaaccgaaatcgctacc

SEQ ID NO: 4332 - DNA, 20 bp, Artificial Sequence
  Synthetic polynucleotide
cgcgaaccgaaatcggactc

SEQ ID NO: 4333 - DNA, 20 bp, Artificial Sequence
  Synthetic polynucleotide
cgcgaaccgaaatcggatcc

SEQ ID NO: 4334 - DNA, 20 bp, Artificial Sequence
  Synthetic polynucleotide
cgcgaaccgaaatcggatgc

SEQ ID NO: 4335 - DNA, 20 bp, Artificial Sequence
  Synthetic polynucleotide
cgcgaaccgaaatcggtagc

SEQ ID NO: 4336 - DNA, 20 bp, Artificial Sequence
  Synthetic polynucleotide
cgcgaaccgaaatcggcatc

SEQ ID NO: 4337 - DNA, 20 bp, Artificial Sequence
  Synthetic polynucleotide
cgcgaaccgaaatcgtacgc

SEQ ID NO: 4338 - DNA, 20 bp, Artificial Sequence
  Synthetic polynucleotide
cgcgaaccgaaatcgtgctc

SEQ ID NO: 4339 - DNA, 20 bp, Artificial Sequence
  Synthetic polynucleotide
cgcgaaccgaaatcgtgcac

SEQ ID NO: 4340 - DNA, 20 bp, Artificial Sequence
  Synthetic polynucleotide
cgcgaaccgaaatcgtcgtc

SEQ ID NO: 4341 - DNA, 20 bp, Artificial Sequence
  Synthetic polynucleotide
cgcgaaccgaaatcgtagcc

SEQ ID NO: 4342 - DNA, 20 bp, Artificial Sequence
  Synthetic polynucleotide
agcggaccagccagcaaaat

SEQ ID NO: 4343 - DNA, 20 bp, Artificial Sequence
  Synthetic polynucleotide
agcggaccagccagccccct

SEQ ID NO: 4344 - DNA, 20 bp, Artificial Sequence
  Synthetic polynucleotide
agcggaccagccagcggggt

SEQ ID NO: 4345 - DNA, 20 bp, Artificial Sequence
  Synthetic polynucleotide
agcggaccagccagcttttt

SEQ ID NO: 4346 - DNA, 20 bp, Artificial Sequence
  Synthetic polynucleotide
agcggaccagccagcacact

SEQ ID NO: 4347 - DNA, 20 bp, Artificial Sequence
  Synthetic polynucleotide
agcggaccagccagcagagt

SEQ ID NO: 4348 - DNA, 20 bp, Artificial Sequence
  Synthetic polynucleotide
agcggaccagccagcatatt

SEQ ID NO: 4349 - DNA, 20 bp, Artificial Sequence
  Synthetic polynucleotide
agcggaccagccagccacat

SEQ ID NO: 4350 - DNA, 20 bp, Artificial Sequence
  Synthetic polynucleotide
agcggaccagccagccgcgt

SEQ ID NO: 4351 - DNA, 20 bp, Artificial Sequence
  Synthetic polynucleotide
agcggaccagccagcctctt

SEQ ID NO: 4352 - DNA, 20 bp, Artificial Sequence
  Synthetic polynucleotide
agcggaccagccagcgagat

SEQ ID NO: 4353 - DNA, 20 bp, Artificial Sequence
  Synthetic polynucleotide
agcggaccagccagcgcgct

SEQ ID NO: 4354 - DNA, 20 bp, Artificial Sequence
  Synthetic polynucleotide
agcggaccagccagcgtgtt

SEQ ID NO: 4355 - DNA, 20 bp, Artificial Sequence
  Synthetic polynucleotide
agcggaccagccagctatat

SEQ ID NO: 4356 - DNA, 20 bp, Artificial Sequence
  Synthetic polynucleotide
agcggaccagccagctctct

SEQ ID NO: 4357 - DNA, 20 bp, Artificial Sequence
  Synthetic polynucleotide
agcggaccagccagctgtgt

SEQ ID NO: 4358 - DNA, 20 bp, Artificial Sequence
  Synthetic polynucleotide
agcggaccagccagcagact

SEQ ID NO: 4359 - DNA, 20 bp, Artificial Sequence
  Synthetic polynucleotide
agcggaccagccagcatagt

SEQ ID NO: 4360 - DNA, 20 bp, Artificial Sequence
  Synthetic polynucleotide
agcggaccagccagcacagt

SEQ ID NO: 4361 - DNA, 20 bp, Artificial Sequence
  Synthetic polynucleotide
agcggaccagccagcagatt

SEQ ID NO: 4362 - DNA, 20 bp, Artificial Sequence
  Synthetic polynucleotide
agcggaccagccagcatact

SEQ ID NO: 4363 - DNA, 20 bp, Artificial Sequence
  Synthetic polynucleotide
agcggaccagccagccgctt

SEQ ID NO: 4364 - DNA, 20 bp, Artificial Sequence
  Synthetic polynucleotide
agcggaccagccagcctcgt

SEQ ID NO: 4365 - DNA, 20 bp, Artificial Sequence
  Synthetic polynucleotide
agcggaccagccagccacgt

SEQ ID NO: 4366 - DNA, 20 bp, Artificial Sequence
  Synthetic polynucleotide
agcggaccagccagccgcat

SEQ ID NO: 4367 - DNA, 20 bp, Artificial Sequence
  Synthetic polynucleotide
agcggaccagccagcctcat

SEQ ID NO: 4368 - DNA, 20 bp, Artificial Sequence
  Synthetic polynucleotide
agcggaccagccagcgagtt

SEQ ID NO: 4369 - DNA, 20 bp, Artificial Sequence
  Synthetic polynucleotide
agcggaccagccagcgagct

SEQ ID NO: 4370 - DNA, 20 bp, Artificial Sequence
  Synthetic polynucleotide
agcggaccagccagcgcgat

SEQ ID NO: 4371 - DNA, 20 bp, Artificial Sequence
  Synthetic polynucleotide
agcggaccagccagcgtgat

SEQ ID NO: 4372 - DNA, 20 bp, Artificial Sequence
  Synthetic polynucleotide
agcggaccagccagcgtgct

SEQ ID NO: 4373 - DNA, 20 bp, Artificial Sequence
  Synthetic polynucleotide
agcggaccagccagctctgt

SEQ ID NO: 4374 - DNA, 20 bp, Artificial Sequence
  Synthetic polynucleotide
agcggaccagccagctatct

SEQ ID NO: 4375 - DNA, 20 bp, Artificial Sequence
  Synthetic polynucleotide
agcggaccagccagctctat

SEQ ID NO: 4376 - DNA, 20 bp, Artificial Sequence
  Synthetic polynucleotide
agcggaccagccagctgtct

SEQ ID NO: 4377 - DNA, 20 bp, Artificial Sequence
  Synthetic polynucleotide
agcggaccagccagctgtat

SEQ ID NO: 4378 - DNA, 20 bp, Artificial Sequence
  Synthetic polynucleotide
agcggaccagccagctacat

SEQ ID NO: 4379 - DNA, 20 bp, Artificial Sequence
  Synthetic polynucleotide
agcggaccagccagcgacat

SEQ ID NO: 4380 - DNA, 20 bp, Artificial Sequence
  Synthetic polynucleotide
agcggaccagccagctagat

SEQ ID NO: 4381 - DNA, 20 bp, Artificial Sequence
  Synthetic polynucleotide
agcggaccagccagccatat

SEQ ID NO: 4382 - DNA, 20 bp, Artificial Sequence
  Synthetic polynucleotide
agcggaccagccagcgatat

SEQ ID NO: 4383 - DNA, 20 bp, Artificial Sequence
  Synthetic polynucleotide
agcggaccagccagcactct

SEQ ID NO: 4384 - DNA, 20 bp, Artificial Sequence
  Synthetic polynucleotide
agcggaccagccagcgcact

SEQ ID NO: 4385 - DNA, 20 bp, Artificial Sequence
  Synthetic polynucleotide
agcggaccagccagctcgct

SEQ ID NO: 4386 - DNA, 20 bp, Artificial Sequence
  Synthetic polynucleotide
agcggaccagccagcacgct

SEQ ID NO: 4387 - DNA, 20 bp, Artificial Sequence
  Synthetic polynucleotide
agcggaccagccagcgctct

SEQ ID NO: 4388 - DNA, 20 bp, Artificial Sequence
  Synthetic polynucleotide
agcggaccagccagcagcgt

SEQ ID NO: 4389 - DNA, 20 bp, Artificial Sequence
  Synthetic polynucleotide
agcggaccagccagccgagt

SEQ ID NO: 4390 - DNA, 20 bp, Artificial Sequence
  Synthetic polynucleotide
agcggaccagccagctgcgt

SEQ ID NO: 4391 - DNA, 20 bp, Artificial Sequence
  Synthetic polynucleotide
agcggaccagccagctgagt

SEQ ID NO: 4392 - DNA, 20 bp, Artificial Sequence
  Synthetic polynucleotide
agcggaccagccagcagtgt

SEQ ID NO: 4393 - DNA, 20 bp, Artificial Sequence
  Synthetic polynucleotide
agcggaccagccagcatgtt

SEQ ID NO: 4394 - DNA, 20 bp, Artificial Sequence
  Synthetic polynucleotide
agcggaccagccagcgtatt

SEQ ID NO: 4395 - DNA, 20 bp, Artificial Sequence
  Synthetic polynucleotide
agcggaccagccagcctatt

SEQ ID NO: 4396 - DNA, 20 bp, Artificial Sequence
  Synthetic polynucleotide
agcggaccagccagcctgtt

SEQ ID NO: 4397 - DNA, 20 bp, Artificial Sequence
  Synthetic polynucleotide
agcggaccagccagcgtctt

SEQ ID NO: 4398 - DNA, 20 bp, Artificial Sequence
  Synthetic polynucleotide
agcggaccagccagcactat

SEQ ID NO: 4399 - DNA, 20 bp, Artificial Sequence
  Synthetic polynucleotide
agcggaccagccagcactgt

SEQ ID NO: 4400 - DNA, 20 bp, Artificial Sequence
  Synthetic polynucleotide
agcggaccagccagcatcat

SEQ ID NO: 4401 - DNA, 20 bp, Artificial Sequence
  Synthetic polynucleotide
agcggaccagccagcagctt

SEQ ID NO: 4402 - DNA, 20 bp, Artificial Sequence
  Synthetic polynucleotide
agcggaccagccagcagtct

SEQ ID NO: 4403 - DNA, 20 bp, Artificial Sequence
  Synthetic polynucleotide
agcggaccagccagccatct

SEQ ID NO: 4404 - DNA, 20 bp, Artificial Sequence
  Synthetic polynucleotide
agcggaccagccagccgact

SEQ ID NO: 4405 - DNA, 20 bp, Artificial Sequence
  Synthetic polynucleotide
agcggaccagccagcctagt

SEQ ID NO: 4406 - DNA, 20 bp, Artificial Sequence
  Synthetic polynucleotide
agcggaccagccagcctgat

SEQ ID NO: 4407 - DNA, 20 bp, Artificial Sequence
  Synthetic polynucleotide
agcggaccagccagccagtt

SEQ ID NO: 4408 - DNA, 20 bp, Artificial Sequence
  Synthetic polynucleotide
agcggaccagccagcgtcgt

SEQ ID NO: 4409 - DNA, 20 bp, Artificial Sequence
  Synthetic polynucleotide
agcggaccagccagcgctgt

SEQ ID NO: 4410 - DNA, 20 bp, Artificial Sequence
  Synthetic polynucleotide
agcggaccagccagcgcatt

SEQ ID NO: 4411 - DNA, 20 bp, Artificial Sequence
  Synthetic polynucleotide
agcggaccagccagcgctat

SEQ ID NO: 4412 - DNA, 20 bp, Artificial Sequence
  Synthetic polynucleotide
agcggaccagccagcgactt

SEQ ID NO: 4413 - DNA, 20 bp, Artificial Sequence
  Synthetic polynucleotide
agcggaccagccagctacgt

SEQ ID NO: 4414 - DNA, 20 bp, Artificial Sequence
  Synthetic polynucleotide
agcggaccagccagctagtt

SEQ ID NO: 4415 - DNA, 20 bp, Artificial Sequence
  Synthetic polynucleotide
agcggaccagccagctcagt

SEQ ID NO: 4416 - DNA, 20 bp, Artificial Sequence
  Synthetic polynucleotide
agcggaccagccagctgact

SEQ ID NO: 4417 - DNA, 20 bp, Artificial Sequence
  Synthetic polynucleotide
agcggaccagccagctagct

SEQ ID NO: 4418 - DNA, 20 bp, Artificial Sequence
  Synthetic polynucleotide
gctgatgtagtcactcttga

SEQ ID NO: 4419 - DNA, 20 bp, Artificial Sequence
  Synthetic polynucleotide
agatgcaggctgcagatgcc

SEQ ID NO: 4420 - DNA, 20 bp, Artificial Sequence
  Synthetic polynucleotide
ggccctcggcggcggctccc

SEQ ID NO: 4421 - DNA, 20 bp, Artificial Sequence
  Synthetic polynucleotide
acagaacatgttgttataga

SEQ ID NO: 4422 - DNA, 20 bp, Artificial Sequence
  Synthetic polynucleotide
acagattctggaaagctcct

SEQ ID NO: 4423 - DNA, 20 bp, Artificial Sequence
  Synthetic polynucleotide
ggtcaacaagtggaactcta

SEQ ID NO: 4424 - DNA, 20 bp, Artificial Sequence
  Synthetic polynucleotide
ggagtatttcaggggctctt

SEQ ID NO: 4425 - DNA, 20 bp, Artificial Sequence
  Synthetic polynucleotide
gggagggctgtgctgctagt

SEQ ID NO: 4426 - DNA, 20 bp, Artificial Sequence
  Synthetic polynucleotide
gcaacttgaaattatatctg

SEQ ID NO: 4427 - DNA, 20 bp, Artificial Sequence
  Synthetic polynucleotide
gtagagaaagaagcagtgcc

SEQ ID NO: 4428 - DNA, 20 bp, Artificial Sequence
  Synthetic polynucleotide
ataggagaagatgatgtata

SEQ ID NO: 4429 - DNA, 20 bp, Artificial Sequence
  Synthetic polynucleotide
gcatacagtgatttgatgaa

SEQ ID NO: 4430 - DNA, 20 bp, Artificial Sequence
  Synthetic polynucleotide
gggggccctcctcttgctgc

SEQ ID NO: 4431 - DNA, 20 bp, Artificial Sequence
  Synthetic polynucleotide
gaaaatcatcagttatcatc

SEQ ID NO: 4432 - DNA, 20 bp, Artificial Sequence
  Synthetic polynucleotide
ttcatgagtcttgacaacaa

SEQ ID NO: 4433 - DNA, 20 bp, Artificial Sequence
  Synthetic polynucleotide
ggtggcgggcactgtcgtca

SEQ ID NO: 4434 - DNA, 20 bp, Artificial Sequence
  Synthetic polynucleotide
atgacagtgccaaagccagc

SEQ ID NO: 4435 - DNA, 20 bp, Artificial Sequence
  Synthetic polynucleotide
acagtagaactaagggtggg

SEQ ID NO: 4436 - DNA, 20 bp, Artificial Sequence
  Synthetic polynucleotide
ccgccgtccaagacctaccg

SEQ ID NO: 4437 - DNA, 20 bp, Artificial Sequence
  Synthetic polynucleotide
gggctgtcaggtccttgggg

SEQ ID NO: 4438 - DNA, 20 bp, Artificial Sequence
  Synthetic polynucleotide
accatgagtaactccattcc

SEQ ID NO: 4439 - DNA, 20 bp, Artificial Sequence
  Synthetic polynucleotide
ggaggtagagattcatgtca

SEQ ID NO: 4440 - DNA, 20 bp, Artificial Sequence
  Synthetic polynucleotide
gaacgaatacagaaaagtaa

SEQ ID NO: 4441 - DNA, 20 bp, Artificial Sequence
  Synthetic polynucleotide
atccgtggcccatcatgtct

SEQ ID NO: 4442 - DNA, 20 bp, Artificial Sequence
  Synthetic polynucleotide
ggtggacaagcggcagatag

SEQ ID NO: 4443 - DNA, 20 bp, Artificial Sequence
  Synthetic polynucleotide
gaactgcaaagtgaaacaaa

SEQ ID NO: 4444 - DNA, 20 bp, Artificial Sequence
  Synthetic polynucleotide
actgacacgcagacattcag

SEQ ID NO: 4445 - DNA, 20 bp, Artificial Sequence
  Synthetic polynucleotide
cgaagctggaatctgctctc

SEQ ID NO: 4446 - DNA, 20 bp, Artificial Sequence
  Synthetic polynucleotide
gaccagccggggcagtgaag

SEQ ID NO: 4447 - DNA, 20 bp, Artificial Sequence
  Synthetic polynucleotide
gagtatctggtaccccagca

SEQ ID NO: 4448 - DNA, 20 bp, Artificial Sequence
  Synthetic polynucleotide
ctgggcaggcgacccgccgc

SEQ ID NO: 4449 - DNA, 20 bp, Artificial Sequence
  Synthetic polynucleotide
gttctccacggcacccccaa

SEQ ID NO: 4450 - DNA, 20 bp, Artificial Sequence
  Synthetic polynucleotide
gagaaagaataccatgcaga

SEQ ID NO: 4451 - DNA, 20 bp, Artificial Sequence
  Synthetic polynucleotide
ctcctcctctgctccgccac

SEQ ID NO: 4452 - DNA, 20 bp, Artificial Sequence
  Synthetic polynucleotide
gctcaggaggaggaagccgg

SEQ ID NO: 4453 - DNA, 20 bp, Artificial Sequence
  Synthetic polynucleotide
gctgaggaggggtcgcggcg

SEQ ID NO: 4454 - DNA, 20 bp, Artificial Sequence
  Synthetic polynucleotide
caagctgtttgccaaagagg

SEQ ID NO: 4455 - DNA, 20 bp, Artificial Sequence
  Synthetic polynucleotide
gcacgcagcggcgggagccc

SEQ ID NO: 4456 - DNA, 20 bp, Artificial Sequence
  Synthetic polynucleotide
ggcccccaagtggacagagc

SEQ ID NO: 4457 - DNA, 20 bp, Artificial Sequence
  Synthetic polynucleotide
ggaagggctaggcgggggcg

SEQ ID NO: 4458 - DNA, 20 bp, Artificial Sequence
  Synthetic polynucleotide
gcaaataaccttctgtgtca

SEQ ID NO: 4459 - DNA, 20 bp, Artificial Sequence
  Synthetic polynucleotide
gcaccaagtctgagtggacc

SEQ ID NO: 4460 - DNA, 20 bp, Artificial Sequence
  Synthetic polynucleotide
gcaggactcctttcctccat

SEQ ID NO: 4461 - DNA, 20 bp, Artificial Sequence
  Synthetic polynucleotide
gctgcgcctctgctgcgcct

SEQ ID NO: 4462 - DNA, 20 bp, Artificial Sequence
  Synthetic polynucleotide
gaagccagctgattataaga

SEQ ID NO: 4463 - DNA, 20 bp, Artificial Sequence
  Synthetic polynucleotide
ccaaaaaagaactgcacctc

SEQ ID NO: 4464 - DNA, 20 bp, Artificial Sequence
  Synthetic polynucleotide
gttcgactacgtggagaagc

SEQ ID NO: 4465 - DNA, 20 bp, Artificial Sequence
  Synthetic polynucleotide
cgaccaaagcgcctgaggac

SEQ ID NO: 4466 - DNA, 20 bp, Artificial Sequence
  Synthetic polynucleotide
cctggccacagcctacatcc

SEQ ID NO: 4467 - DNA, 20 bp, Artificial Sequence
  Synthetic polynucleotide
ggcactgacaatcccctttc

SEQ ID NO: 4468 - DNA, 20 bp, Artificial Sequence
  Synthetic polynucleotide
gaggagctccaagaagactg

SEQ ID NO: 4469 - DNA, 20 bp, Artificial Sequence
  Synthetic polynucleotide
gaagaagacaaatcacaaac

SEQ ID NO: 4470 - DNA, 20 bp, Artificial Sequence
  Synthetic polynucleotide
ggggcgggaagagcgcgtcc

SEQ ID NO: 4471 - DNA, 20 bp, Artificial Sequence
  Synthetic polynucleotide
ctcgtctgataagacaacag

SEQ ID NO: 4472 - DNA, 20 bp, Artificial Sequence
  Synthetic polynucleotide
gtgaatagagccagcaaagg

SEQ ID NO: 4473 - DNA, 20 bp, Artificial Sequence
  Synthetic polynucleotide
gactcgcagacgccctctgc

SEQ ID NO: 4474 - DNA, 20 bp, Artificial Sequence
  Synthetic polynucleotide
ttgtcgtcttctgtccaagt

SEQ ID NO: 4475 - DNA, 20 bp, Artificial Sequence
  Synthetic polynucleotide
gaggcgcagcagtgccacag

SEQ ID NO: 4476 - DNA, 20 bp, Artificial Sequence
  Synthetic polynucleotide
ggccatggcgggctggatcc

SEQ ID NO: 4477 - DNA, 20 bp, Artificial Sequence
  Synthetic polynucleotide
gagccaagatggggctctgc

SEQ ID NO: 4478 - DNA, 20 bp, Artificial Sequence
  Synthetic polynucleotide
gggtggggggagtttgctcc

SEQ ID NO: 4479 - DNA, 20 bp, Artificial Sequence
  Synthetic polynucleotide
gccgaggctgctggaggaag

SEQ ID NO: 4480 - DNA, 20 bp, Artificial Sequence
  Synthetic polynucleotide
gcaaaactcaaccctacccc

SEQ ID NO: 4481 - DNA, 20 bp, Artificial Sequence
  Synthetic polynucleotide
gaatccatcttcctgaccct

SEQ ID NO: 4482 - DNA, 20 bp, Artificial Sequence
  Synthetic polynucleotide
ctaggtgatgatgtcagatt

SEQ ID NO: 4483 - DNA, 20 bp, Artificial Sequence
  Synthetic polynucleotide
gagcagagatgtgggaatgg

SEQ ID NO: 4484 - DNA, 20 bp, Artificial Sequence
  Synthetic polynucleotide
gggactggggtcgggagggt

SEQ ID NO: 4485 - DNA, 20 bp, Artificial Sequence
  Synthetic polynucleotide
gagaaagctggagaaggggg

SEQ ID NO: 4486 - DNA, 20 bp, Artificial Sequence
  Synthetic polynucleotide
gcgcagggaagcgaccaact

SEQ ID NO: 4487 - DNA, 20 bp, Artificial Sequence
  Synthetic polynucleotide
gaagagggggagagagttac

SEQ ID NO: 4488 - DNA, 20 bp, Artificial Sequence
  Synthetic polynucleotide
gtggaagagtttgtggaagg

SEQ ID NO: 4489 - DNA, 20 bp, Artificial Sequence
  Synthetic polynucleotide
agttcccagctgcacgcctc

SEQ ID NO: 4490 - DNA, 20 bp, Artificial Sequence
  Synthetic polynucleotide
gaagagggaaacgtgtggct

SEQ ID NO: 4491 - DNA, 20 bp, Artificial Sequence
  Synthetic polynucleotide
ggtgggtctcgggactggca

SEQ ID NO: 4492 - DNA, 20 bp, Artificial Sequence
  Synthetic polynucleotide
gaatgagggtcctttgggaa

SEQ ID NO: 4493 - DNA, 20 bp, Artificial Sequence
  Synthetic polynucleotide
ggtgggggcggaagggggcc

SEQ ID NO: 4494 - DNA, 20 bp, Artificial Sequence
  Synthetic polynucleotide
cggccagagaccgagcccta

SEQ ID NO: 4495 - DNA, 20 bp, Artificial Sequence
  Synthetic polynucleotide
gttgtggcagcagtcactgg

SEQ ID NO: 4496 - DNA, 20 bp, Artificial Sequence
  Synthetic polynucleotide
caacagcagcagccacctgg

SEQ ID NO: 4497 - DNA, 20 bp, Artificial Sequence
  Synthetic polynucleotide
ggagccagcccctggccttc

SEQ ID NO: 4498 - DNA, 20 bp, Artificial Sequence
  Synthetic polynucleotide
tcccaaaggcggagggcgtt

SEQ ID NO: 4499 - DNA, 20 bp, Artificial Sequence
  Synthetic polynucleotide
tgagtccgagcagaagaaga

SEQ ID NO: 4500 - DNA, 20 bp, Artificial Sequence
  Synthetic polynucleotide
gagtccgagcagaagaagaa

SEQ ID NO: 4501 - DNA, 20 bp, Artificial Sequence
  Synthetic polynucleotide
ggcagccagcatgatgagac

SEQ ID NO: 4502 - DNA, 20 bp, Artificial Sequence
  Synthetic polynucleotide
cttctttgcttgttcaaatg

SEQ ID NO: 4503 - DNA, 20 bp, Artificial Sequence
  Synthetic polynucleotide
gcagggtgagtgtctcagcc

SEQ ID NO: 4504 - DNA, 20 bp, Artificial Sequence
  Synthetic polynucleotide
gaactgtgtgtgttgcaggg

SEQ ID NO: 4505 - DNA, 20 bp, Artificial Sequence
  Synthetic polynucleotide
gggctgagagagggacaagt

SEQ ID NO: 4506 - DNA, 20 bp, Artificial Sequence
  Synthetic polynucleotide
aaaacgtttccaagacatga

SEQ ID NO: 4507 - DNA, 20 bp, Artificial Sequence
  Synthetic polynucleotide
ccacgcccgcggggtgaagt

SEQ ID NO: 4508 - DNA, 20 bp, Artificial Sequence
  Synthetic polynucleotide
ccttccagcagcagcagcag

SEQ ID NO: 4509 - DNA, 20 bp, Artificial Sequence
  Synthetic polynucleotide
agtccttccagcagcagcag

SEQ ID NO: 4510 - DNA, 20 bp, Artificial Sequence
  Synthetic polynucleotide
tcaagtccttccagcagcag

SEQ ID NO: 4511 - DNA, 20 bp, Artificial Sequence
  Synthetic polynucleotide
ccctcaagtccttccagcag

SEQ ID NO: 4512 - DNA, 20 bp, Artificial Sequence
  Synthetic polynucleotide
gatccccccagcagcagcag

SEQ ID NO: 4513 - DNA, 20 bp, Artificial Sequence
  Synthetic polynucleotide
tgtgatccccccagcagcag

SEQ ID NO: 4514 - DNA, 20 bp, Artificial Sequence
  Synthetic polynucleotide
gtctgtgatccccccagcag

SEQ ID NO: 4515 - DNA, 20 bp, Artificial Sequence
  Synthetic polynucleotide
gtttgctgctgctgcagcag

SEQ ID NO: 4516 - DNA, 20 bp, Artificial Sequence
  Synthetic polynucleotide
cggcagcgcggcggcggcgg

SEQ ID NO: 4517 - DNA, 20 bp, Artificial Sequence
  Synthetic polynucleotide
gtgcggcagcgcggcggcgg

SEQ ID NO: 4518 - DNA, 20 bp, Artificial Sequence
  Synthetic polynucleotide
ggcgtgcggcagcgcggcgg

SEQ ID NO: 4519 - DNA, 20 bp, Artificial Sequence
  Synthetic polynucleotide
catttagtgctgctctatgc

SEQ ID NO: 4520 - DNA, 20 bp, Artificial Sequence
  Synthetic polynucleotide
caggaaatgctggcatagag

SEQ ID NO: 4521 - DNA, 20 bp, Artificial Sequence
  Synthetic polynucleotide
ttgcaggaaatgctggcata

SEQ ID NO: 4522 - DNA, 20 bp, Artificial Sequence
  Synthetic polynucleotide
tttgcaggaaatgctggcat

SEQ ID NO: 4523 - DNA, 20 bp, Artificial Sequence
  Synthetic polynucleotide
atttgcaggaaatgctggca

SEQ ID NO: 4524 - DNA, 20 bp, Artificial Sequence
  Synthetic polynucleotide
ttctcatttgcaggaaatgc

SEQ ID NO: 4525 - DNA, 20 bp, Artificial Sequence
  Synthetic polynucleotide
actaacatcacaaggtgata

SEQ ID NO: 4526 - DNA, 20 bp, Artificial Sequence
  Synthetic polynucleotide
ttgtccttgcagtcggcagt

SEQ ID NO: 4527 - DNA, 20 bp, Artificial Sequence
  Synthetic polynucleotide
gcaggtccagcaaccaacca

SEQ ID NO: 4528 - DNA, 20 bp, Artificial Sequence
  Synthetic polynucleotide
acagcttcagcgagccgagc

SEQ ID NO: 4529 - DNA, 20 bp, Artificial Sequence
  Synthetic polynucleotide
ccctcctacaggaccgacca

SEQ ID NO: 4530 - DNA, 20 bp, Artificial Sequence
  Synthetic polynucleotide
gctggtccagctggtccagc

SEQ ID NO: 4531 - DNA, 20 bp, Artificial Sequence
  Synthetic polynucleotide
tgacacagaaaagagaggag

SEQ ID NO: 4532 - DNA, 20 bp, Artificial Sequence
  Synthetic polynucleotide
ttaggtgggcttagatttgt

SEQ ID NO: 4533 - DNA, 20 bp, Artificial Sequence
  Synthetic polynucleotide
gctagtatggaggatctggg

SEQ ID NO: 4534 - DNA, 20 bp, Artificial Sequence
  Synthetic polynucleotide
ggaggaggaggaggaggagg

SEQ ID NO: 4535 - DNA, 20 bp, Artificial Sequence
  Synthetic polynucleotide
ggggcgggggatggtggtgg

SEQ ID NO: 4536 - DNA, 20 bp, Artificial Sequence
  Synthetic polynucleotide
catgaacatgagcggcatgg

SEQ ID NO: 4537 - DNA, 20 bp, Artificial Sequence
  Synthetic polynucleotide
ttgtgccacatggctccaca

SEQ ID NO: 4538 - DNA, 20 bp, Artificial Sequence
  Synthetic polynucleotide
gtaaatgttaccaggaggtc

SEQ ID NO: 4539 - DNA, 20 bp, Artificial Sequence
  Synthetic polynucleotide
acgcttgcagccccgggccc

SEQ ID NO: 4540 - DNA, 20 bp, Artificial Sequence
  Synthetic polynucleotide
ggaagaggaggaggaggagg

SEQ ID NO: 4541 - DNA, 20 bp, Artificial Sequence
  Synthetic polynucleotide
agcactggcacagccagcac

SEQ ID NO: 4542 - DNA, 20 bp, Artificial Sequence
  Synthetic polynucleotide
gcggcgggggcggcggcggg

SEQ ID NO: 4543 - DNA, 20 bp, Artificial Sequence
  Synthetic polynucleotide
gaggccaaagaaacccaccc

SEQ ID NO: 4544 - DNA, 20 bp, Artificial Sequence
  Synthetic polynucleotide
cggctccgggactgggcccc

SEQ ID NO: 4545 - DNA, 20 bp, Artificial Sequence
  Synthetic polynucleotide
ggaactgacagagacttgtg

SEQ ID NO: 4546 - DNA, 20 bp, Artificial Sequence
  Synthetic polynucleotide
aacttgatccactgattgat

SEQ ID NO: 4547 - DNA, 20 bp, Artificial Sequence
  Synthetic polynucleotide
gggggtcctgctggtggagg

SEQ ID NO: 4548 - DNA, 20 bp, Artificial Sequence
  Synthetic polynucleotide
gtcgccccggggccgccccg

SEQ ID NO: 4549 - DNA, 20 bp, Artificial Sequence
  Synthetic polynucleotide
aagaagaggaagaagaggga

SEQ ID NO: 4550 - DNA, 20 bp, Artificial Sequence
  Synthetic polynucleotide
tggaggtgcggaagcggaag

SEQ ID NO: 4551 - DNA, 20 bp, Artificial Sequence
  Synthetic polynucleotide
ctgtgtgttaacactagcta

SEQ ID NO: 4552 - DNA, 20 bp, Artificial Sequence
  Synthetic polynucleotide
gaatatcgtgtagagataga

SEQ ID NO: 4553 - DNA, 20 bp, Artificial Sequence
  Synthetic polynucleotide
agtcattactagggaaggga

SEQ ID NO: 4554 - DNA, 20 bp, Artificial Sequence
  Synthetic polynucleotide
agcagcagccccttggccct

SEQ ID NO: 4555 - DNA, 20 bp, Artificial Sequence
  Synthetic polynucleotide
agacaaaaggaggatcaagg

SEQ ID NO: 4556 - DNA, 20 bp, Artificial Sequence
  Synthetic polynucleotide
tattttacactcatggttca

SEQ ID NO: 4557 - DNA, 20 bp, Artificial Sequence
  Synthetic polynucleotide
catgtcccaatggatactta

SEQ ID NO: 4558 - DNA, 20 bp, Artificial Sequence
  Synthetic polynucleotide
gcgactgggtgcgctggcgc

SEQ ID NO: 4559 - DNA, 20 bp, Artificial Sequence
  Synthetic polynucleotide
cagaaaggccttctggattc

SEQ ID NO: 4560 - DNA, 20 bp, Artificial Sequence
  Synthetic polynucleotide
ggccgtttgagggacaggtg

SEQ ID NO: 4561 - DNA, 20 bp, Artificial Sequence
  Synthetic polynucleotide
gctggagtgtgaggagtgtg

SEQ ID NO: 4562 - DNA, 20 bp, Artificial Sequence
  Synthetic polynucleotide
tgtgaactatggtgcatata

SEQ ID NO: 4563 - DNA, 20 bp, Artificial Sequence
  Synthetic polynucleotide
tcgggagctggagctggagc

SEQ ID NO: 4564 - DNA, 20 bp, Artificial Sequence
  Synthetic polynucleotide
tcctccgctcggcgcggcgg

SEQ ID NO: 4565 - DNA, 20 bp, Artificial Sequence
  Synthetic polynucleotide
ttggcagtggtggcatgagg

SEQ ID NO: 4566 - DNA, 20 bp, Artificial Sequence
  Synthetic polynucleotide
taccagcccgacgagggacg

SEQ ID NO: 4567 - DNA, 20 bp, Artificial Sequence
  Synthetic polynucleotide
tagtcacatgattggcagat

SEQ ID NO: 4568 - DNA, 20 bp, Artificial Sequence
  Synthetic polynucleotide
tgcgagagctgcggcagctg

SEQ ID NO: 4569 - DNA, 20 bp, Artificial Sequence
  Synthetic polynucleotide
ctcaactccggcatcggcat

SEQ ID NO: 4570 - DNA, 20 bp, Artificial Sequence
  Synthetic polynucleotide
gggtacaggtcctcctgaac

SEQ ID NO: 4571 - DNA, 20 bp, Artificial Sequence
  Synthetic polynucleotide
ttgcccttggtgagcacgct

SEQ ID NO: 4572 - DNA, 20 bp, Artificial Sequence
  Synthetic polynucleotide
cttggtgactgagttgggct

SEQ ID NO: 4573 - DNA, 20 bp, Artificial Sequence
  Synthetic polynucleotide
agcagcagcggcggcggcgg

SEQ ID NO: 4574 - DNA, 20 bp, Artificial Sequence
  Synthetic polynucleotide
acatcatgtgcggggatgcg

SEQ ID NO: 4575 - DNA, 20 bp, Artificial Sequence
  Synthetic polynucleotide
tcattgactatttcattgac

SEQ ID NO: 4576 - DNA, 20 bp, Artificial Sequence
  Synthetic polynucleotide
ataaacacagagggagtgag

SEQ ID NO: 4577 - DNA, 20 bp, Artificial Sequence
  Synthetic polynucleotide
gccaggtagcccaggttggt

SEQ ID NO: 4578 - DNA, 20 bp, Artificial Sequence
  Synthetic polynucleotide
gaagatggcggcagcggcag

SEQ ID NO: 4579 - DNA, 20 bp, Artificial Sequence
  Synthetic polynucleotide
cttcctgctgcggctccgag

SEQ ID NO: 4580 - DNA, 20 bp, Artificial Sequence
  Synthetic polynucleotide
agtggcaatggcaatggcaa

SEQ ID NO: 4581 - DNA, 20 bp, Artificial Sequence
  Synthetic polynucleotide
cagcttcccccgctttcggt

SEQ ID NO: 4582 - DNA, 20 bp, Artificial Sequence
  Synthetic polynucleotide
gaggaggaagaagaggaaag

SEQ ID NO: 4583 - DNA, 20 bp, Artificial Sequence
  Synthetic polynucleotide
gcggcgggggcggcggcagg

SEQ ID NO: 4584 - DNA, 20 bp, Artificial Sequence
  Synthetic polynucleotide
ccagctcgcgcaggctgcgc

SEQ ID NO: 4585 - DNA, 20 bp, Artificial Sequence
  Synthetic polynucleotide
cggaagagcagggagtaagt

SEQ ID NO: 4586 - DNA, 20 bp, Artificial Sequence
  Synthetic polynucleotide
gctgcggacgccgggacgcc

SEQ ID NO: 4587 - DNA, 20 bp, Artificial Sequence
  Synthetic polynucleotide
aagactgctcagggctactc

SEQ ID NO: 4588 - DNA, 20 bp, Artificial Sequence
  Synthetic polynucleotide
tgtctctcttggcagtcagt

SEQ ID NO: 4589 - DNA, 20 bp, Artificial Sequence
  Synthetic polynucleotide
ccgtgctcctggggctgggc

SEQ ID NO: 4590 - DNA, 20 bp, Artificial Sequence
  Synthetic polynucleotide
cgccccctcgcggtgcggtg

SEQ ID NO: 4591 - DNA, 20 bp, Artificial Sequence
  Synthetic polynucleotide
gtgcccagccagccagccag

SEQ ID NO: 4592 - DNA, 20 bp, Artificial Sequence
  Synthetic polynucleotide
aaaatctgctagaggaaaag

SEQ ID NO: 4593 - DNA, 20 bp, Artificial Sequence
  Synthetic polynucleotide
gccctccgtcagcagcagca

SEQ ID NO: 4594 - DNA, 20 bp, Artificial Sequence
  Synthetic polynucleotide
gatggaggggccggactgga

SEQ ID NO: 4595 - DNA, 20 bp, Artificial Sequence
  Synthetic polynucleotide
gccttcagcgccaggatctc

SEQ ID NO: 4596 - DNA, 20 bp, Artificial Sequence
  Synthetic polynucleotide
ccacactggcaagtccacac

SEQ ID NO: 4597 - DNA, 20 bp, Artificial Sequence
  Synthetic polynucleotide
gagacggagggggagcaagc

SEQ ID NO: 4598 - DNA, 20 bp, Artificial Sequence
  Synthetic polynucleotide
cagtgtatcgctcccggccc

SEQ ID NO: 4599 - DNA, 20 bp, Artificial Sequence
  Synthetic polynucleotide
ttaggatctgaatccagtcc

SEQ ID NO: 4600 - DNA, 20 bp, Artificial Sequence
  Synthetic polynucleotide
cgctctcgggcattgattgt

SEQ ID NO: 4601 - DNA, 20 bp, Artificial Sequence
  Synthetic polynucleotide
catgatctctggaggaagcg

SEQ ID NO: 4602 - DNA, 20 bp, Artificial Sequence
  Synthetic polynucleotide
agctgcgccacgggctgggc

SEQ ID NO: 4603 - DNA, 20 bp, Artificial Sequence
  Synthetic polynucleotide
ccggcggcggaagctcccgg

SEQ ID NO: 4604 - DNA, 20 bp, Artificial Sequence
  Synthetic polynucleotide
tgcggtgccgggggcggcgg

SEQ ID NO: 4605 - DNA, 20 bp, Artificial Sequence
  Synthetic polynucleotide
aaggtgaagcagcatctatc

SEQ ID NO: 4606 - DNA, 20 bp, Artificial Sequence
  Synthetic polynucleotide
aagattctgatgtggaatgg

SEQ ID NO: 4607 - DNA, 20 bp, Artificial Sequence
  Synthetic polynucleotide
gaaaaagagaggaggagggg

SEQ ID NO: 4608 - DNA, 20 bp, Artificial Sequence
  Synthetic polynucleotide
aggtactacgagaccgagac

SEQ ID NO: 4609 - DNA, 20 bp, Artificial Sequence
  Synthetic polynucleotide
ggcaggggacgcccggctcg

SEQ ID NO: 4610 - DNA, 20 bp, Artificial Sequence
  Synthetic polynucleotide
caaccagaagaagaagaaga

SEQ ID NO: 4611 - DNA, 20 bp, Artificial Sequence
  Synthetic polynucleotide
aaaggaaatgcagcagtatg

SEQ ID NO: 4612 - DNA, 20 bp, Artificial Sequence
  Synthetic polynucleotide
gagcttgctcctttctttct

SEQ ID NO: 4613 - DNA, 20 bp, Artificial Sequence
  Synthetic polynucleotide
agtggtactgcgaatggtgg

SEQ ID NO: 4614 - DNA, 20 bp, Artificial Sequence
  Synthetic polynucleotide
gatacatcccagactagact

SEQ ID NO: 4615 - DNA, 20 bp, Artificial Sequence
  Synthetic polynucleotide
ggcggcggcggcggcggcgg

SEQ ID NO: 4616 - DNA, 20 bp, Artificial Sequence
  Synthetic polynucleotide
gccacgccagggtactactg

SEQ ID NO: 4617 - DNA, 20 bp, Artificial Sequence
  Synthetic polynucleotide
ttgccctgggactccagcct

SEQ ID NO: 4618 - DNA, 20 bp, Artificial Sequence
  Synthetic polynucleotide
gcagaccctccgagcagagc

SEQ ID NO: 4619 - DNA, 20 bp, Artificial Sequence
  Synthetic polynucleotide
aggagctgtgcacgacgaca

SEQ ID NO: 4620 - DNA, 20 bp, Artificial Sequence
  Synthetic polynucleotide
ttgtagatggccatggccca

SEQ ID NO: 4621 - DNA, 20 bp, Artificial Sequence
  Synthetic polynucleotide
aattttgaatggataatgaa

SEQ ID NO: 4622 - DNA, 20 bp, Artificial Sequence
  Synthetic polynucleotide
ttgcaggggaagaacagaac

SEQ ID NO: 4623 - DNA, 20 bp, Artificial Sequence
  Synthetic polynucleotide
gtgctcagcattggcagcat

SEQ ID NO: 4624 - DNA, 20 bp, Artificial Sequence
  Synthetic polynucleotide
catgcccttctaaaggttaa

SEQ ID NO: 4625 - DNA, 20 bp, Artificial Sequence
  Synthetic polynucleotide
acatctactcgctggtgagc

SEQ ID NO: 4626 - DNA, 20 bp, Artificial Sequence
  Synthetic polynucleotide
tactaatgaatggtagtgaa

SEQ ID NO: 4627 - DNA, 20 bp, Artificial Sequence
  Synthetic polynucleotide
ctgtccctggcttttatccc

SEQ ID NO: 4628 - DNA, 20 bp, Artificial Sequence
  Synthetic polynucleotide
gaagaagaagaagaagaaga

SEQ ID NO: 4629 - DNA, 20 bp, Artificial Sequence
  Synthetic polynucleotide
tcagaaggggtaatccagaa

SEQ ID NO: 4630 - DNA, 20 bp, Artificial Sequence
  Synthetic polynucleotide
ctgatgtgctttgttctttc

SEQ ID NO: 4631 - DNA, 20 bp, Artificial Sequence
  Synthetic polynucleotide
gacggcatgctgctggctgc

SEQ ID NO: 4632 - DNA, 20 bp, Artificial Sequence
  Synthetic polynucleotide
ctgctgctgctgctgctcct

SEQ ID NO: 4633 - DNA, 20 bp, Artificial Sequence
  Synthetic polynucleotide
atacgaccccactatagaag

SEQ ID NO: 4634 - DNA, 20 bp, Artificial Sequence
  Synthetic polynucleotide
ggccaggatgggcagcaagc

SEQ ID NO: 4635 - DNA, 20 bp, Artificial Sequence
  Synthetic polynucleotide
aaggtgacagtgcctgcctg

SEQ ID NO: 4636 - DNA, 20 bp, Artificial Sequence
  Synthetic polynucleotide
agcggaggaggaggaggagg

SEQ ID NO: 4637 - DNA, 20 bp, Artificial Sequence
  Synthetic polynucleotide
tcaccgtgcggcacagctcg

SEQ ID NO: 4638 - DNA, 20 bp, Artificial Sequence
  Synthetic polynucleotide
cccttcccagtgaggcaggc

SEQ ID NO: 4639 - DNA, 20 bp, Artificial Sequence
  Synthetic polynucleotide
atgatggctggcatgatggc

SEQ ID NO: 4640 - DNA, 20 bp, Artificial Sequence
  Synthetic polynucleotide
tctcggtgatgagcagcagc

SEQ ID NO: 4641 - DNA, 20 bp, Artificial Sequence
  Synthetic polynucleotide
ggtcaactggtagacacaac

SEQ ID NO: 4642 - DNA, 20 bp, Artificial Sequence
  Synthetic polynucleotide
tttatagttatgaggaaatg

SEQ ID NO: 4643 - DNA, 20 bp, Artificial Sequence
  Synthetic polynucleotide
gcgaagatggctcggaggct

SEQ ID NO: 4644 - DNA, 20 bp, Artificial Sequence
  Synthetic polynucleotide
gagctggcccggcggcggcc

SEQ ID NO: 4645 - DNA, 20 bp, Artificial Sequence
  Synthetic polynucleotide
ggcggcggcggcggcggcgg

SEQ ID NO: 4646 - DNA, 20 bp, Artificial Sequence
  Synthetic polynucleotide
ctgcagaaggtgactgcaga

SEQ ID NO: 4647 - DNA, 20 bp, Artificial Sequence
  Synthetic polynucleotide
tgtccttttgctccaggcag

SEQ ID NO: 4648 - DNA, 20 bp, Artificial Sequence
  Synthetic polynucleotide
caatataactggataataac

SEQ ID NO: 4649 - DNA, 20 bp, Artificial Sequence
  Synthetic polynucleotide
gatgatgatgatgatgatga

SEQ ID NO: 4650 - DNA, 20 bp, Artificial Sequence
  Synthetic polynucleotide
ccaggtatttcttgctgtgc

SEQ ID NO: 4651 - DNA, 20 bp, Artificial Sequence
  Synthetic polynucleotide
acatggtggagagtggaagg

SEQ ID NO: 4652 - DNA, 20 bp, Artificial Sequence
  Synthetic polynucleotide
ttgctggtgaagtggttaag

SEQ ID NO: 4653 - DNA, 20 bp, Artificial Sequence
  Synthetic polynucleotide
ctgaggaatgcagaatgcag

SEQ ID NO: 4654 - DNA, 20 bp, Artificial Sequence
  Synthetic polynucleotide
acacaggagctgtttctttc

SEQ ID NO: 4655 - DNA, 20 bp, Artificial Sequence
  Synthetic polynucleotide
ttttgcaagaatttatcatc

SEQ ID NO: 4656 - DNA, 20 bp, Artificial Sequence
  Synthetic polynucleotide
acagcacctccggggggcgg

SEQ ID NO: 4657 - DNA, 20 bp, Artificial Sequence
  Synthetic polynucleotide
cgcgggcaggcagacggggg

SEQ ID NO: 4658 - DNA, 20 bp, Artificial Sequence
  Synthetic polynucleotide
ggcggcggcggcggcggcgg

SEQ ID NO: 4659 - DNA, 20 bp, Artificial Sequence
  Synthetic polynucleotide
cgctgcttcgtgcggctggc

SEQ ID NO: 4660 - DNA, 20 bp, Artificial Sequence
  Synthetic polynucleotide
gcccatgatggcagaggcag

SEQ ID NO: 4661 - DNA, 20 bp, Artificial Sequence
  Synthetic polynucleotide
tggcggaggcggcggcgcgg

SEQ ID NO: 4662 - DNA, 20 bp, Artificial Sequence
  Synthetic polynucleotide
gctgaacattggctgaacat

SEQ ID NO: 4663 - DNA, 20 bp, Artificial Sequence
  Synthetic polynucleotide
ctcaccaccccctggaggga

SEQ ID NO: 4664 - DNA, 20 bp, Artificial Sequence
  Synthetic polynucleotide
ccagacactacaacaacaac

SEQ ID NO: 4665 - DNA, 20 bp, Artificial Sequence
  Synthetic polynucleotide
cctggtactcctgggtctcc

SEQ ID NO: 4666 - DNA, 20 bp, Artificial Sequence
  Synthetic polynucleotide
cggcccggcggcacacggcc

SEQ ID NO: 4667 - DNA, 20 bp, Artificial Sequence
  Synthetic polynucleotide
ggcggcggcggcggcggcgg

SEQ ID NO: 4668 - DNA, 20 bp, Artificial Sequence
  Synthetic polynucleotide
ggcggcggcggcggcggcgg

SEQ ID NO: 4669 - DNA, 20 bp, Artificial Sequence
  Synthetic polynucleotide
gagagctgcggctgcggctg

SEQ ID NO: 4670 - DNA, 20 bp, Artificial Sequence
  Synthetic polynucleotide
cagcttgaaggcagcggcgg

SEQ ID NO: 4671 - DNA, 20 bp, Artificial Sequence
  Synthetic polynucleotide
ccctgcggcgctaagtaaga

SEQ ID NO: 4672 - DNA, 20 bp, Artificial Sequence
  Synthetic polynucleotide
gcggccgggtcgatgtaggt

SEQ ID NO: 4673 - DNA, 20 bp, Artificial Sequence
  Synthetic polynucleotide
gccgcgtccggggccggggc

SEQ ID NO: 4674 - DNA, 20 bp, Artificial Sequence
  Synthetic polynucleotide
gtccatcacgtcgtagggca

SEQ ID NO: 4675 - DNA, 20 bp, Artificial Sequence
  Synthetic polynucleotide
agcggaggaggaggaggagg

SEQ ID NO: 4676 - DNA, 20 bp, Artificial Sequence
  Synthetic polynucleotide
tgcagacgaggacgaggacg

SEQ ID NO: 4677 - DNA, 20 bp, Artificial Sequence
  Synthetic polynucleotide
ccagcgacgggcagcggcgg

SEQ ID NO: 4678 - DNA, 20 bp, Artificial Sequence
  Synthetic polynucleotide
cttcgaggccgaggaggagg

SEQ ID NO: 4679 - DNA, 20 bp, Artificial Sequence
  Synthetic polynucleotide
tggagtcatttttgttgtgt

SEQ ID NO: 4680 - DNA, 20 bp, Artificial Sequence
  Synthetic polynucleotide
gtgaccgcttgaactggctg

SEQ ID NO: 4681 - DNA, 20 bp, Artificial Sequence
  Synthetic polynucleotide
gcggggcggctggcccgccc

SEQ ID NO: 4682 - DNA, 20 bp, Artificial Sequence
  Synthetic polynucleotide
aggtaacccaggagaaagtc

SEQ ID NO: 4683 - DNA, 20 bp, Artificial Sequence
  Synthetic polynucleotide
ggcccccgctgctggcaggc

SEQ ID NO: 4684 - DNA, 20 bp, Artificial Sequence
  Synthetic polynucleotide
gagggtcggcctcagctttt

SEQ ID NO: 4685 - DNA, 20 bp, Artificial Sequence
  Synthetic polynucleotide
cgccgctaccggctcgccac

SEQ ID NO: 4686 - DNA, 20 bp, Artificial Sequence
  Synthetic polynucleotide
cctgtggcctgctgcctgcc

SEQ ID NO: 4687 - DNA, 20 bp, Artificial Sequence
  Synthetic polynucleotide
aaacgccccggcaggaagcc

SEQ ID NO: 4688 - DNA, 20 bp, Artificial Sequence
  Synthetic polynucleotide
atacgaccccactatagagg

SEQ ID NO: 4689 - DNA, 20 bp, Artificial Sequence
  Synthetic polynucleotide
agcgagcgcgcctggcgggc

SEQ ID NO: 4690 - DNA, 20 bp, Artificial Sequence
  Synthetic polynucleotide
ctctctctctctctctctgc

SEQ ID NO: 4691 - DNA, 20 bp, Artificial Sequence
  Synthetic polynucleotide
cgactgcaaggacaaatctg

SEQ ID NO: 4692 - DNA, 20 bp, Artificial Sequence
  Synthetic polynucleotide
cgctcctggctggcgcggcg

SEQ ID NO: 4693 - DNA, 20 bp, Artificial Sequence
  Synthetic polynucleotide
ctaaaaatttgctgaagtga

SEQ ID NO: 4694 - DNA, 20 bp, Artificial Sequence
  Synthetic polynucleotide
cgccacgggctgggccgggc

SEQ ID NO: 4695 - DNA, 20 bp, Artificial Sequence
  Synthetic polynucleotide
tcagggcccgcagcaacaac

SEQ ID NO: 4696 - DNA, 20 bp, Artificial Sequence
  Synthetic polynucleotide
ggaggaggaggaggaggagg

SEQ ID NO: 4697 - DNA, 20 bp, Artificial Sequence
  Synthetic polynucleotide
ccacacgggccttgacgtac

SEQ ID NO: 4698 - DNA, 20 bp, Artificial Sequence
  Synthetic polynucleotide
gcaggacaacagatggctga

SEQ ID NO: 4699 - DNA, 20 bp, Artificial Sequence
  Synthetic polynucleotide
cctctttggctcttttcttc

SEQ ID NO: 4700 - DNA, 20 bp, Artificial Sequence
  Synthetic polynucleotide
aatgcaaccgaagcaggatg

SEQ ID NO: 4701 - DNA, 20 bp, Artificial Sequence
  Synthetic polynucleotide
cgatgacggcattggcgcat

SEQ ID NO: 4702 - DNA, 20 bp, Artificial Sequence
  Synthetic polynucleotide
ggcggctgctgctgctgctg

SEQ ID NO: 4703 - DNA, 20 bp, Artificial Sequence
  Synthetic polynucleotide
atcttcgcagtcttcgcagt

SEQ ID NO: 4704 - DNA, 20 bp, Artificial Sequence
  Synthetic polynucleotide
ggaggaggaggaggaggagg

SEQ ID NO: 4705 - DNA, 20 bp, Artificial Sequence
  Synthetic polynucleotide
tgggccgggccgggcagggc

SEQ ID NO: 4706 - DNA, 20 bp, Artificial Sequence
  Synthetic polynucleotide
ctgcggggccacggtcggtc

SEQ ID NO: 4707 - DNA, 20 bp, Artificial Sequence
  Synthetic polynucleotide
ggtggctggggcggcggcgg

SEQ ID NO: 4708 - DNA, 20 bp, Artificial Sequence
  Synthetic polynucleotide
ggcccggaacatggacggac

SEQ ID NO: 4709 - DNA, 20 bp, Artificial Sequence
  Synthetic polynucleotide
ggactctgagtggtgggtga

SEQ ID NO: 4710 - DNA, 20 bp, Artificial Sequence
  Synthetic polynucleotide
tattatgagactgtttgttt

SEQ ID NO: 4711 - DNA, 20 bp, Artificial Sequence
  Synthetic polynucleotide
cgcctcgcctcgcctcgcct

SEQ ID NO: 4712 - DNA, 20 bp, Artificial Sequence
  Synthetic polynucleotide
cagaggcagtgtggacagtg

SEQ ID NO: 4713 - DNA, 20 bp, Artificial Sequence
  Synthetic polynucleotide
cgctacctggcgcggctccc

SEQ ID NO: 4714 - DNA, 20 bp, Artificial Sequence
  Synthetic polynucleotide
aagtacgtggacaagctacg

SEQ ID NO: 4715 - DNA, 20 bp, Artificial Sequence
  Synthetic polynucleotide
agcttaaaaggactatgcta

SEQ ID NO: 4716 - DNA, 20 bp, Artificial Sequence
  Synthetic polynucleotide
gcgggggcgcggctggggcg

SEQ ID NO: 4717 - DNA, 20 bp, Artificial Sequence
  Synthetic polynucleotide
tacctcacggtgggccttca

SEQ ID NO: 4718 - DNA, 20 bp, Artificial Sequence
  Synthetic polynucleotide
gggcacacttgaagaaagaa

SEQ ID NO: 4719 - DNA, 20 bp, Artificial Sequence
  Synthetic polynucleotide
gcccctgcccctgctgactg

SEQ ID NO: 4720 - DNA, 20 bp, Artificial Sequence
  Synthetic polynucleotide
tggccctagtacctacctga

SEQ ID NO: 4721 - DNA, 20 bp, Artificial Sequence
  Synthetic polynucleotide
tgggccggggcggtttgggg

SEQ ID NO: 4722 - DNA, 20 bp, Artificial Sequence
  Synthetic polynucleotide
ggatgttgtgctgctgctgc

SEQ ID NO: 4723 - DNA, 20 bp, Artificial Sequence
  Synthetic polynucleotide
cgcggccagctgcgaggagg

SEQ ID NO: 4724 - DNA, 20 bp, Artificial Sequence
  Synthetic polynucleotide
gccgcgagaggttatgggag

SEQ ID NO: 4725 - DNA, 20 bp, Artificial Sequence
  Synthetic polynucleotide
aaactggagaaaaataggat

SEQ ID NO: 4726 - DNA, 20 bp, Artificial Sequence
  Synthetic polynucleotide
tcccctgccttgactggaac

SEQ ID NO: 4727 - DNA, 20 bp, Artificial Sequence
  Synthetic polynucleotide
ttctttaaacgagaaggaga

SEQ ID NO: 4728 - DNA, 20 bp, Artificial Sequence
  Synthetic polynucleotide
gtacgtggcgctcatcgccg

SEQ ID NO: 4729 - DNA, 20 bp, Artificial Sequence
  Synthetic polynucleotide
gctggaccagctgggccagc

SEQ ID NO: 4730 - DNA, 20 bp, Artificial Sequence
  Synthetic polynucleotide
aggtaggctcgggaaggcgg

SEQ ID NO: 4731 - DNA, 20 bp, Artificial Sequence
  Synthetic polynucleotide
gccgggcgcgatgggcgcga

SEQ ID NO: 4732 - DNA, 20 bp, Artificial Sequence
  Synthetic polynucleotide
tatcgaagtcgtcctcactc

SEQ ID NO: 4733 - DNA, 20 bp, Artificial Sequence
  Synthetic polynucleotide
ctctgcggcaagtccctctg

SEQ ID NO: 4734 - DNA, 20 bp, Artificial Sequence
  Synthetic polynucleotide
gaacctgggcaagctggacc

SEQ ID NO: 4735 - DNA, 20 bp, Artificial Sequence
  Synthetic polynucleotide
agtcaggcgaccggcggcgg

SEQ ID NO: 4736 - DNA, 20 bp, Artificial Sequence
  Synthetic polynucleotide
gtgggtgctgagggtgccga

SEQ ID NO: 4737 - DNA, 20 bp, Artificial Sequence
  Synthetic polynucleotide
ggtccacagacagcgggtgg

SEQ ID NO: 4738 - DNA, 20 bp, Artificial Sequence
  Synthetic polynucleotide
cgatcaccgtgcggcacgtg

SEQ ID NO: 4739 - DNA, 20 bp, Artificial Sequence
  Synthetic polynucleotide
agctctggcacagccagctc

SEQ ID NO: 4740 - DNA, 20 bp, Artificial Sequence
  Synthetic polynucleotide
aaaactgctgctgctgcctg

SEQ ID NO: 4741 - DNA, 20 bp, Artificial Sequence
  Synthetic polynucleotide
catgaacacgcgcacgggca

SEQ ID NO: 4742 - DNA, 20 bp, Artificial Sequence
  Synthetic polynucleotide
tctggaacacgtcagcgggc

SEQ ID NO: 4743 - DNA, 20 bp, Artificial Sequence
  Synthetic polynucleotide
ggcggcggcggcggcggcgg

SEQ ID NO: 4744 - DNA, 20 bp, Artificial Sequence
  Synthetic polynucleotide
gcccgcaactacctggaacc

SEQ ID NO: 4745 - DNA, 20 bp, Artificial Sequence
  Synthetic polynucleotide
ggtcacgctacctggcgacc

SEQ ID NO: 4746 - DNA, 20 bp, Artificial Sequence
  Synthetic polynucleotide
tctgagtggtggtgatgtgg

SEQ ID NO: 4747 - DNA, 20 bp, Artificial Sequence
  Synthetic polynucleotide
tgctctggactcgtgctctc

SEQ ID NO: 4748 - DNA, 20 bp, Artificial Sequence
  Synthetic polynucleotide
tttggatcctaggtagatga

SEQ ID NO: 4749 - DNA, 20 bp, Artificial Sequence
  Synthetic polynucleotide
caggcggcggtgcggcggtg

SEQ ID NO: 4750 - DNA, 20 bp, Artificial Sequence
  Synthetic polynucleotide
tagcatgaagacggtgaaga

SEQ ID NO: 4751 - DNA, 20 bp, Artificial Sequence
  Synthetic polynucleotide
gcggcaggtgcggctgcagc

SEQ ID NO: 4752 - DNA, 20 bp, Artificial Sequence
  Synthetic polynucleotide
cactacatcacagaggctgt

SEQ ID NO: 4753 - DNA, 20 bp, Artificial Sequence
  Synthetic polynucleotide
gacgacgacgacgacaatga

SEQ ID NO: 4754 - DNA, 20 bp, Artificial Sequence
  Synthetic polynucleotide
cagtgaggaggaagaagagg

SEQ ID NO: 4755 - DNA, 20 bp, Artificial Sequence
  Synthetic polynucleotide
gacgtgggctgggccgggcc

SEQ ID NO: 4756 - DNA, 20 bp, Artificial Sequence
  Synthetic polynucleotide
tgcgcacggggtcccggccc

SEQ ID NO: 4757 - DNA, 20 bp, Artificial Sequence
  Synthetic polynucleotide
caccaatcccagttggtgct

SEQ ID NO: 4758 - DNA, 20 bp, Artificial Sequence
  Synthetic polynucleotide
tccgctcggcgcggcggcgg

SEQ ID NO: 4759 - DNA, 20 bp, Artificial Sequence
  Synthetic polynucleotide
atctaactgaagaggctttg

SEQ ID NO: 4760 - DNA, 20 bp, Artificial Sequence
  Synthetic polynucleotide
agcagcagcagcagcagcag

SEQ ID NO: 4761 - DNA, 20 bp, Artificial Sequence
  Synthetic polynucleotide
acggctgtggagctgacctg

SEQ ID NO: 4762 - DNA, 20 bp, Artificial Sequence
  Synthetic polynucleotide
ccagcgcagcgcagcgcagc

SEQ ID NO: 4763 - DNA, 20 bp, Artificial Sequence
  Synthetic polynucleotide
tggacgtagtcgccatgcca

SEQ ID NO: 4764 - DNA, 20 bp, Artificial Sequence
  Synthetic polynucleotide
ttggtgcatgaggatgcatg

SEQ ID NO: 4765 - DNA, 20 bp, Artificial Sequence
  Synthetic polynucleotide
tctaaaaattgctgaagtga

SEQ ID NO: 4766 - DNA, 20 bp, Artificial Sequence
  Synthetic polynucleotide
tcgtataagccaatgttggt

SEQ ID NO: 4767 - DNA, 20 bp, Artificial Sequence
  Synthetic polynucleotide
gcgaagatgcgaagatgcga

SEQ ID NO: 4768 - DNA, 20 bp, Artificial Sequence
  Synthetic polynucleotide
gcggcgggctcgggctgcgg

SEQ ID NO: 4769 - DNA, 20 bp, Artificial Sequence
  Synthetic polynucleotide
cagagctcaggcagaagctg

SEQ ID NO: 4770 - DNA, 20 bp, Artificial Sequence
  Synthetic polynucleotide
ggggcggggctgggctgggc

SEQ ID NO: 4771 - DNA, 20 bp, Artificial Sequence
  Synthetic polynucleotide
ccaggtgcacgatgcgtcgt

SEQ ID NO: 4772 - DNA, 20 bp, Artificial Sequence
  Synthetic polynucleotide
ccttgtgatgttagttagtt

SEQ ID NO: 4773 - DNA, 20 bp, Artificial Sequence
  Synthetic polynucleotide
tctctgcctgcaggatgagc

SEQ ID NO: 4774 - DNA, 20 bp, Artificial Sequence
  Synthetic polynucleotide
tccagaagaagctgaagggg

SEQ ID NO: 4775 - DNA, 20 bp, Artificial Sequence
  Synthetic polynucleotide
agaccaccagcagccgccta

SEQ ID NO: 4776 - DNA, 20 bp, Artificial Sequence
  Synthetic polynucleotide
gagtccagtgaaatggaaaa

SEQ ID NO: 4777 - DNA, 20 bp, Artificial Sequence
  Synthetic polynucleotide
ggcagtggtggcatgagggg

SEQ ID NO: 4778 - DNA, 20 bp, Artificial Sequence
  Synthetic polynucleotide
tctgaaggcaggtgcaaggc

SEQ ID NO: 4779 - DNA, 20 bp, Artificial Sequence
  Synthetic polynucleotide
gacatggctcacacggcaca

SEQ ID NO: 4780 - DNA, 20 bp, Artificial Sequence
  Synthetic polynucleotide
cggtggctgagctggatgga

SEQ ID NO: 4781 - DNA, 20 bp, Artificial Sequence
  Synthetic polynucleotide
tcccttaggaaaaaaagaca

SEQ ID NO: 4782 - DNA, 20 bp, Artificial Sequence
  Synthetic polynucleotide
tgcaaggacaaatctgactg

SEQ ID NO: 4783 - DNA, 20 bp, Artificial Sequence
  Synthetic polynucleotide
ctcaggaagaagagaagagc

SEQ ID NO: 4784 - DNA, 20 bp, Artificial Sequence
  Synthetic polynucleotide
cttcacctctccttttagga

SEQ ID NO: 4785 - DNA, 20 bp, Artificial Sequence
  Synthetic polynucleotide
gagcagcggcagaaaaacag

SEQ ID NO: 4786 - DNA, 20 bp, Artificial Sequence
  Synthetic polynucleotide
gggcagccgggcacgaaggt

SEQ ID NO: 4787 - DNA, 20 bp, Artificial Sequence
  Synthetic polynucleotide
accatgttcttcaggctggc

SEQ ID NO: 4788 - DNA, 20 bp, Artificial Sequence
  Synthetic polynucleotide
ctggggctgcgttgcagctg

SEQ ID NO: 4789 - DNA, 20 bp, Artificial Sequence
  Synthetic polynucleotide
actgtctgaagagctggagc

SEQ ID NO: 4790 - DNA, 20 bp, Artificial Sequence
  Synthetic polynucleotide
caggcctcgtgactttttgc

SEQ ID NO: 4791 - DNA, 20 bp, Artificial Sequence
  Synthetic polynucleotide
aagatcatacagacagagag

SEQ ID NO: 4792 - DNA, 20 bp, Artificial Sequence
  Synthetic polynucleotide
cgtgtgcaatacaggtggta

SEQ ID NO: 4793 - DNA, 20 bp, Artificial Sequence
  Synthetic polynucleotide
tttttccacttctggatcag

SEQ ID NO: 4794 - DNA, 20 bp, Artificial Sequence
  Synthetic polynucleotide
aaggggaaattgcacaagcc

SEQ ID NO: 4795 - DNA, 20 bp, Artificial Sequence
  Synthetic polynucleotide
cagcagaccagggccccacc

SEQ ID NO: 4796 - DNA, 20 bp, Artificial Sequence
  Synthetic polynucleotide
gaactcaaaacactggctgt

SEQ ID NO: 4797 - DNA, 20 bp, Artificial Sequence
  Synthetic polynucleotide
atgataccacaggattgggt

SEQ ID NO: 4798 - DNA, 20 bp, Artificial Sequence
  Synthetic polynucleotide
ggtttggttgtcagggcccc

SEQ ID NO: 4799 - DNA, 20 bp, Artificial Sequence
  Synthetic polynucleotide
cggccagccagccccggtac

SEQ ID NO: 4800 - DNA, 20 bp, Artificial Sequence
  Synthetic polynucleotide
gattcccatcaaacaaacag

SEQ ID NO: 4801 - DNA, 20 bp, Artificial Sequence
  Synthetic polynucleotide
ttgccaaagctgttagggtt

SEQ ID NO: 4802 - DNA, 20 bp, Artificial Sequence
  Synthetic polynucleotide
aaggttcttaaagatgatgt

SEQ ID NO: 4803 - DNA, 20 bp, Artificial Sequence
  Synthetic polynucleotide
tgggtttgaaggatgcgatg

SEQ ID NO: 4804 - DNA, 20 bp, Artificial Sequence
  Synthetic polynucleotide
gaatagcttctctatctatc

SEQ ID NO: 4805 - DNA, 20 bp, Artificial Sequence
  Synthetic polynucleotide
cacagaaacatgtacagtac

SEQ ID NO: 4806 - DNA, 20 bp, Artificial Sequence
  Synthetic polynucleotide
gcggggaactggcgcggcgc

SEQ ID NO: 4807 - DNA, 20 bp, Artificial Sequence
  Synthetic polynucleotide
catgccgtctgcaatctctc

SEQ ID NO: 4808 - DNA, 20 bp, Artificial Sequence
  Synthetic polynucleotide
tgtaacaatcttctctggcg

SEQ ID NO: 4809 - DNA, 20 bp, Artificial Sequence
  Synthetic polynucleotide
cccggggccgccgacccacc

SEQ ID NO: 4810 - DNA, 20 bp, Artificial Sequence
  Synthetic polynucleotide
cgaatctcatctcacctcac

SEQ ID NO: 4811 - DNA, 20 bp, Artificial Sequence
  Synthetic polynucleotide
tgccaggcacaaaacggttt

SEQ ID NO: 4812 - DNA, 20 bp, Artificial Sequence
  Synthetic polynucleotide
tttggaagatgagccacctt

SEQ ID NO: 4813 - DNA, 20 bp, Artificial Sequence
  Synthetic polynucleotide
cataagacttggacttgact

SEQ ID NO: 4814 - DNA, 20 bp, Artificial Sequence
  Synthetic polynucleotide
aaaaagcagatgacttgggt

SEQ ID NO: 4815 - DNA, 20 bp, Artificial Sequence
  Synthetic polynucleotide
aggctgctgcggccctgctg

SEQ ID NO: 4816 - DNA, 20 bp, Artificial Sequence
  Synthetic polynucleotide
ctgggatgctgggccccgct

SEQ ID NO: 4817 - DNA, 20 bp, Artificial Sequence
  Synthetic polynucleotide
tggagggtggaacgtggtgg

SEQ ID NO: 4818 - DNA, 20 bp, Artificial Sequence
  Synthetic polynucleotide
gctacgcggtggaggcaggg

SEQ ID NO: 4819 - DNA, 20 bp, Artificial Sequence
  Synthetic polynucleotide
tcccggccaccctggtcccc

SEQ ID NO: 4820 - DNA, 20 bp, Artificial Sequence
  Synthetic polynucleotide
ttcccctcaaaacatcattg

SEQ ID NO: 4821 - DNA, 20 bp, Artificial Sequence
  Synthetic polynucleotide
ggctggcagacggggccaga

SEQ ID NO: 4822 - DNA, 20 bp, Artificial Sequence
  Synthetic polynucleotide
aggtgggagaaggtgagaga

SEQ ID NO: 4823 - DNA, 20 bp, Artificial Sequence
  Synthetic polynucleotide
catctggacccttttccatc

SEQ ID NO: 4824 - DNA, 20 bp, Artificial Sequence
  Synthetic polynucleotide
aattttcttgttcatggcgg

SEQ ID NO: 4825 - DNA, 20 bp, Artificial Sequence
  Synthetic polynucleotide
tataccctgatagagtcggt

SEQ ID NO: 4826 - DNA, 20 bp, Artificial Sequence
  Synthetic polynucleotide
aacactggctgtttcatgca

SEQ ID NO: 4827 - DNA, 20 bp, Artificial Sequence
  Synthetic polynucleotide
cggtggggcaggcggcggtg

SEQ ID NO: 4828 - DNA, 20 bp, Artificial Sequence
  Synthetic polynucleotide
ggtgtggaaggagtcgccgc

SEQ ID NO: 4829 - DNA, 20 bp, Artificial Sequence
  Synthetic polynucleotide
ctgcaggacaacggcaggac

SEQ ID NO: 4830 - DNA, 20 bp, Artificial Sequence
  Synthetic polynucleotide
ggggcggcggcggcggccgg

SEQ ID NO: 4831 - DNA, 20 bp, Artificial Sequence
  Synthetic polynucleotide
gagggcgatggcgaaggcga

SEQ ID NO: 4832 - DNA, 20 bp, Artificial Sequence
  Synthetic polynucleotide
cgctcccggtgccccgctcc

SEQ ID NO: 4833 - DNA, 20 bp, Artificial Sequence
  Synthetic polynucleotide
ttccgggctaaagaagcccc

SEQ ID NO: 4834 - DNA, 20 bp, Artificial Sequence
  Synthetic polynucleotide
gccatcatcatcatcatcag

SEQ ID NO: 4835 - DNA, 20 bp, Artificial Sequence
  Synthetic polynucleotide
tagtggccatgcacgtcacg

SEQ ID NO: 4836 - DNA, 20 bp, Artificial Sequence
  Synthetic polynucleotide
gcgtggtaaacttttgggcg

SEQ ID NO: 4837 - DNA, 20 bp, Artificial Sequence
  Synthetic polynucleotide
ggttctttgagcaaccaaca

SEQ ID NO: 4838 - DNA, 20 bp, Artificial Sequence
  Synthetic polynucleotide
gcaccaggaactcggcttct

SEQ ID NO: 4839 - DNA, 20 bp, Artificial Sequence
  Synthetic polynucleotide
gcgtgaacctggagggtggg

SEQ ID NO: 4840 - DNA, 20 bp, Artificial Sequence
  Synthetic polynucleotide
acccactggacactggacac

SEQ ID NO: 4841 - DNA, 20 bp, Artificial Sequence
  Synthetic polynucleotide
ccaggaagtcttggaagtct

SEQ ID NO: 4842 - DNA, 20 bp, Artificial Sequence
  Synthetic polynucleotide
cagtggctgggctgcgggtc

SEQ ID NO: 4843 - DNA, 20 bp, Artificial Sequence
  Synthetic polynucleotide
gttgcgcagccaccggacac

SEQ ID NO: 4844 - DNA, 20 bp, Artificial Sequence
  Synthetic polynucleotide
ctcgctggctgcagggctgc

SEQ ID NO: 4845 - DNA, 20 bp, Artificial Sequence
  Synthetic polynucleotide
gccttctaccggaaagatga

SEQ ID NO: 4846 - DNA, 20 bp, Artificial Sequence
  Synthetic polynucleotide
cgacggcagctctccgacga

SEQ ID NO: 4847 - DNA, 20 bp, Artificial Sequence
  Synthetic polynucleotide
tggaggcctgcgggaagctt

SEQ ID NO: 4848 - DNA, 20 bp, Artificial Sequence
  Synthetic polynucleotide
ggtcggcgtggaggcggcgg

SEQ ID NO: 4849 - DNA, 20 bp, Artificial Sequence
  Synthetic polynucleotide
gaagcctctgggctcgggct

SEQ ID NO: 4850 - DNA, 20 bp, Artificial Sequence
  Synthetic polynucleotide
tcacccctggatatatgtat

SEQ ID NO: 4851 - DNA, 20 bp, Artificial Sequence
  Synthetic polynucleotide
tgctgagcagtgtggaagtg

SEQ ID NO: 4852 - DNA, 20 bp, Artificial Sequence
  Synthetic polynucleotide
ttggatacagagcagggagc

SEQ ID NO: 4853 - DNA, 20 bp, Artificial Sequence
  Synthetic polynucleotide
gtggccctgcccggcgcgtg

SEQ ID NO: 4854 - DNA, 20 bp, Artificial Sequence
  Synthetic polynucleotide
tttcaagcttttgatgaatg

SEQ ID NO: 4855 - DNA, 20 bp, Artificial Sequence
  Synthetic polynucleotide
agctggacttgctcaggagc

SEQ ID NO: 4856 - DNA, 20 bp, Artificial Sequence
  Synthetic polynucleotide
aggcgggtcgggggcggggc

SEQ ID NO: 4857 - DNA, 20 bp, Artificial Sequence
  Synthetic polynucleotide
gtagtgattggctgattgat

SEQ ID NO: 4858 - DNA, 20 bp, Artificial Sequence
  Synthetic polynucleotide
acgccggcatctcaggccgc

SEQ ID NO: 4859 - DNA, 20 bp, Artificial Sequence
  Synthetic polynucleotide
cttggacaccgtcaggtgtc

SEQ ID NO: 4860 - DNA, 20 bp, Artificial Sequence
  Synthetic polynucleotide
acggctcctcggcctcgcct

SEQ ID NO: 4861 - DNA, 20 bp, Artificial Sequence
  Synthetic polynucleotide
agagtggaaggccaggcagg

SEQ ID NO: 4862 - DNA, 20 bp, Artificial Sequence
  Synthetic polynucleotide
gccgggagacggggctgctg

SEQ ID NO: 4863 - DNA, 20 bp, Artificial Sequence
  Synthetic polynucleotide
ggccttccgctacagacaga

SEQ ID NO: 4864 - DNA, 20 bp, Artificial Sequence
  Synthetic polynucleotide
cccgaggtccgctgctcccg

SEQ ID NO: 4865 - DNA, 20 bp, Artificial Sequence
  Synthetic polynucleotide
tctgcagctgcagctgcagc

SEQ ID NO: 4866 - DNA, 20 bp, Artificial Sequence
  Synthetic polynucleotide
catttgtggcaaaacatttg

SEQ ID NO: 4867 - DNA, 20 bp, Artificial Sequence
  Synthetic polynucleotide
gttggcaccaggcacggacg

SEQ ID NO: 4868 - DNA, 20 bp, Artificial Sequence
  Synthetic polynucleotide
cctggtccccctggtccccc

SEQ ID NO: 4869 - DNA, 20 bp, Artificial Sequence
  Synthetic polynucleotide
gaatgcgcgaagcagggcgt

SEQ ID NO: 4870 - DNA, 20 bp, Artificial Sequence
  Synthetic polynucleotide
gtcacagacacagatccatc

SEQ ID NO: 4871 - DNA, 20 bp, Artificial Sequence
  Synthetic polynucleotide
gtctccagccttgtctgtct

SEQ ID NO: 4872 - DNA, 20 bp, Artificial Sequence
  Synthetic polynucleotide
gacgcgctctcgtaggtggt

SEQ ID NO: 4873 - DNA, 20 bp, Artificial Sequence
  Synthetic polynucleotide
ggagccatccagcaggaagc

SEQ ID NO: 4874 - DNA, 20 bp, Artificial Sequence
  Synthetic polynucleotide
atgtatatgcaactggttgg

SEQ ID NO: 4875 - DNA, 20 bp, Artificial Sequence
  Synthetic polynucleotide
ataaacatacggaggagtcg

SEQ ID NO: 4876 - DNA, 20 bp, Artificial Sequence
  Synthetic polynucleotide
cacctggatgagacggtccc

SEQ ID NO: 4877 - DNA, 20 bp, Artificial Sequence
  Synthetic polynucleotide
ctgttccaggtagtggtgat

SEQ ID NO: 4878 - DNA, 20 bp, Artificial Sequence
  Synthetic polynucleotide
tttttccatataagataaga

SEQ ID NO: 4879 - DNA, 20 bp, Artificial Sequence
  Synthetic polynucleotide
tgctggcacctgagccgtgc

SEQ ID NO: 4880 - DNA, 20 bp, Artificial Sequence
  Synthetic polynucleotide
gtgggagcaggaggcctgcc

SEQ ID NO: 4881 - DNA, 20 bp, Artificial Sequence
  Synthetic polynucleotide
ggtgcggcgggaggaggcgg

SEQ ID NO: 4882 - DNA, 20 bp, Artificial Sequence
  Synthetic polynucleotide
tcttggacggcggccggccg

SEQ ID NO: 4883 - DNA, 20 bp, Artificial Sequence
  Synthetic polynucleotide
gcacgcggtgctggctctgc

SEQ ID NO: 4884 - DNA, 20 bp, Artificial Sequence
  Synthetic polynucleotide
aagggcagtggtgagcaagc

SEQ ID NO: 4885 - DNA, 20 bp, Artificial Sequence
  Synthetic polynucleotide
gtgatccggagatcggagat

SEQ ID NO: 4886 - DNA, 20 bp, Artificial Sequence
  Synthetic polynucleotide
tatgtcaactggattgatta

SEQ ID NO: 4887 - DNA, 20 bp, Artificial Sequence
  Synthetic polynucleotide
gacgagactatctggctggc

SEQ ID NO: 4888 - DNA, 20 bp, Artificial Sequence
  Synthetic polynucleotide
tatagagtgtggtataaatg

SEQ ID NO: 4889 - DNA, 20 bp, Artificial Sequence
  Synthetic polynucleotide
gcacgaagacatcgataata

SEQ ID NO: 4890 - DNA, 20 bp, Artificial Sequence
  Synthetic polynucleotide
cagaaaaagtagaaaaaaaa

SEQ ID NO: 4891 - DNA, 20 bp, Artificial Sequence
  Synthetic polynucleotide
aatggatcttacagggttac

SEQ ID NO: 4892 - DNA, 20 bp, Artificial Sequence
  Synthetic polynucleotide
cgcgggcggcgcgggcggcg

SEQ ID NO: 4893 - DNA, 20 bp, Artificial Sequence
  Synthetic polynucleotide
ggtagcagcagcagcagcag

SEQ ID NO: 4894 - DNA, 20 bp, Artificial Sequence
  Synthetic polynucleotide
ttcaggatgagactggagac

SEQ ID NO: 4895 - DNA, 20 bp, Artificial Sequence
  Synthetic polynucleotide
tcagactcaggatggatgga

SEQ ID NO: 4896 - DNA, 20 bp, Artificial Sequence
  Synthetic polynucleotide
agaggcgctaccaggcgggc

SEQ ID NO: 4897 - DNA, 20 bp, Artificial Sequence
  Synthetic polynucleotide
agaagcagaagatagaagat

SEQ ID NO: 4898 - DNA, 20 bp, Artificial Sequence
  Synthetic polynucleotide
tctcatggatgagacgctca

SEQ ID NO: 4899 - DNA, 20 bp, Artificial Sequence
  Synthetic polynucleotide
tctttggctatgaaggttga

SEQ ID NO: 4900 - DNA, 20 bp, Artificial Sequence
  Synthetic polynucleotide
agcatctggaacaacagaac

SEQ ID NO: 4901 - DNA, 20 bp, Artificial Sequence
  Synthetic polynucleotide
cctgctggacctcactcgct

SEQ ID NO: 4902 - DNA, 20 bp, Artificial Sequence
  Synthetic polynucleotide
tcttctcatcatcatcatcg

SEQ ID NO: 4903 - DNA, 20 bp, Artificial Sequence
  Synthetic polynucleotide
ctttgtgttccagcagcaca

SEQ ID NO: 4904 - DNA, 20 bp, Artificial Sequence
  Synthetic polynucleotide
tctgtggaagtgctcagcat

SEQ ID NO: 4905 - DNA, 20 bp, Artificial Sequence
  Synthetic polynucleotide
gatttcctggagaaaggggg

SEQ ID NO: 4906 - DNA, 20 bp, Artificial Sequence
  Synthetic polynucleotide
tattttacttagacatgaca

SEQ ID NO: 4907 - DNA, 20 bp, Artificial Sequence
  Synthetic polynucleotide
cggaaggccacgactccccc

SEQ ID NO: 4908 - DNA, 20 bp, Artificial Sequence
  Synthetic polynucleotide
aagatgacgctggaccggac

SEQ ID NO: 4909 - DNA, 20 bp, Artificial Sequence
  Synthetic polynucleotide
atgaagactgacaggatgga

SEQ ID NO: 4910 - DNA, 20 bp, Artificial Sequence
  Synthetic polynucleotide
gcagcctggctgccgcagcc

SEQ ID NO: 4911 - DNA, 20 bp, Artificial Sequence
  Synthetic polynucleotide
aagacagcacacaaaaaaaa

SEQ ID NO: 4912 - DNA, 20 bp, Artificial Sequence
  Synthetic polynucleotide
ggctggtccattcccggggc

SEQ ID NO: 4913 - DNA, 20 bp, Artificial Sequence
  Synthetic polynucleotide
ccttcagcagccttcggtgc

SEQ ID NO: 4914 - DNA, 20 bp, Artificial Sequence
  Synthetic polynucleotide
cgaatgctataatgagtagt

SEQ ID NO: 4915 - DNA, 20 bp, Artificial Sequence
  Synthetic polynucleotide
tctccagcccgggtcggcgg

SEQ ID NO: 4916 - DNA, 20 bp, Artificial Sequence
  Synthetic polynucleotide
ctcaaggaacaatcaatcag

SEQ ID NO: 4917 - DNA, 20 bp, Artificial Sequence
  Synthetic polynucleotide
acgctgaagcagaacacaca

SEQ ID NO: 4918 - DNA, 20 bp, Artificial Sequence
  Synthetic polynucleotide
taggtccaggtgctgggtcc

SEQ ID NO: 4919 - DNA, 20 bp, Artificial Sequence
  Synthetic polynucleotide
gggtggcgggctgggccacc

SEQ ID NO: 4920 - DNA, 20 bp, Artificial Sequence
  Synthetic polynucleotide
actgacacctcagggacaaa

SEQ ID NO: 4921 - DNA, 20 bp, Artificial Sequence
  Synthetic polynucleotide
aggacaaatctgacactgca

SEQ ID NO: 4922 - DNA, 20 bp, Artificial Sequence
  Synthetic polynucleotide
atatggtgctctttaaaaca

SEQ ID NO: 4923 - DNA, 20 bp, Artificial Sequence
  Synthetic polynucleotide
aagggcgcactgctgctgct

SEQ ID NO: 4924 - DNA, 20 bp, Artificial Sequence
  Synthetic polynucleotide
gctgcccgcgctgctgctgc

SEQ ID NO: 4925 - DNA, 20 bp, Artificial Sequence
  Synthetic polynucleotide
tggtggatgtggcggagagg

SEQ ID NO: 4926 - DNA, 20 bp, Artificial Sequence
  Synthetic polynucleotide
atccaagtaagagaagtaag

SEQ ID NO: 4927 - DNA, 20 bp, Artificial Sequence
  Synthetic polynucleotide
gtcggcggccccggggcgac

SEQ ID NO: 4928 - DNA, 20 bp, Artificial Sequence
  Synthetic polynucleotide
attggaggcctgactcactc

SEQ ID NO: 4929 - DNA, 20 bp, Artificial Sequence
  Synthetic polynucleotide
gggggcatctatgtctgcgg

SEQ ID NO: 4930 - DNA, 20 bp, Artificial Sequence
  Synthetic polynucleotide
gaactcggcggggaggtgct

SEQ ID NO: 4931 - DNA, 20 bp, Artificial Sequence
  Synthetic polynucleotide
tcagtggatcaagtttacag

SEQ ID NO: 4932 - DNA, 20 bp, Artificial Sequence
  Synthetic polynucleotide
gttatggataaatatgaata

SEQ ID NO: 4933 - DNA, 20 bp, Artificial Sequence
  Synthetic polynucleotide
tgtttttgctgtaggttttg

SEQ ID NO: 4934 - DNA, 20 bp, Artificial Sequence
  Synthetic polynucleotide
cgcggcgctggacgacggcg

SEQ ID NO: 4935 - DNA, 20 bp, Artificial Sequence
  Synthetic polynucleotide
cctggtgctgtaggtgctca

SEQ ID NO: 4936 - DNA, 20 bp, Artificial Sequence
  Synthetic polynucleotide
gaaagggccttcctgaggaa

SEQ ID NO: 4937 - DNA, 20 bp, Artificial Sequence
  Synthetic polynucleotide
tgaccgccttactgaaatga

SEQ ID NO: 4938 - DNA, 20 bp, Artificial Sequence
  Synthetic polynucleotide
atgatgaagcggcccagaag

SEQ ID NO: 4939 - DNA, 20 bp, Artificial Sequence
  Synthetic polynucleotide
ttggacagcagattcacgaa

SEQ ID NO: 4940 - DNA, 20 bp, Artificial Sequence
  Synthetic polynucleotide
ctgcgctgtggacactgctg

SEQ ID NO: 4941 - DNA, 20 bp, Artificial Sequence
  Synthetic polynucleotide
gacggcgacggtgtagtgga

SEQ ID NO: 4942 - DNA, 20 bp, Artificial Sequence
  Synthetic polynucleotide
agcgatcaggatgaccacca

SEQ ID NO: 4943 - DNA, 20 bp, Artificial Sequence
  Synthetic polynucleotide
gacagcggagtggagctggc

SEQ ID NO: 4944 - DNA, 20 bp, Artificial Sequence
  Synthetic polynucleotide
tacctggtgcgggaggaggg

SEQ ID NO: 4945 - DNA, 20 bp, Artificial Sequence
  Synthetic polynucleotide
gcaggctgacgagtgcctgc

SEQ ID NO: 4946 - DNA, 20 bp, Artificial Sequence
  Synthetic polynucleotide
cggcggtggctgctggatac

SEQ ID NO: 4947 - DNA, 20 bp, Artificial Sequence
  Synthetic polynucleotide
gatcttgtcctgatggaaaa

SEQ ID NO: 4948 - DNA, 20 bp, Artificial Sequence
  Synthetic polynucleotide
ctaacatcacaaggtgatca

SEQ ID NO: 4949 - DNA, 20 bp, Artificial Sequence
  Synthetic polynucleotide
ttgctactctcagaaagaaa

SEQ ID NO: 4950 - DNA, 20 bp, Artificial Sequence
  Synthetic polynucleotide
cctgtgcaccatgtgtaggt

SEQ ID NO: 4951 - DNA, 20 bp, Artificial Sequence
  Synthetic polynucleotide
actttaggcagaggctgggc

SEQ ID NO: 4952 - DNA, 20 bp, Artificial Sequence
  Synthetic polynucleotide
attttggctttctgtatgta

SEQ ID NO: 4953 - DNA, 20 bp, Artificial Sequence
  Synthetic polynucleotide
cgtggccgacctgtctatcg

SEQ ID NO: 4954 - DNA, 20 bp, Artificial Sequence
  Synthetic polynucleotide
tgtgatgaagctgaaggaag

SEQ ID NO: 4955 - DNA, 20 bp, Artificial Sequence
  Synthetic polynucleotide
aaaaatcgttttagggtttt

SEQ ID NO: 4956 - DNA, 20 bp, Artificial Sequence
  Synthetic polynucleotide
caagaccgaacactacttac

SEQ ID NO: 4957 - DNA, 20 bp, Artificial Sequence
  Synthetic polynucleotide
ggaggtggaggtggaggtgg

SEQ ID NO: 4958 - DNA, 20 bp, Artificial Sequence
  Synthetic polynucleotide
agcccagcgcgcaggagcag

SEQ ID NO: 4959 - DNA, 20 bp, Artificial Sequence
  Synthetic polynucleotide
ccagggggtccttgaatgaa

SEQ ID NO: 4960 - DNA, 20 bp, Artificial Sequence
  Synthetic polynucleotide
gagaggctgccggacaggac

SEQ ID NO: 4961 - DNA, 20 bp, Artificial Sequence
  Synthetic polynucleotide
ggctgccttcgggccgcctt

SEQ ID NO: 4962 - DNA, 20 bp, Artificial Sequence
  Synthetic polynucleotide
ggcggcggcggcggcagcag

SEQ ID NO: 4963 - DNA, 20 bp, Artificial Sequence
  Synthetic polynucleotide
cccgactgcaaggacaaatc

SEQ ID NO: 4964 - DNA, 20 bp, Artificial Sequence
  Synthetic polynucleotide
ggaggaggaggaggaggagg

SEQ ID NO: 4965 - DNA, 20 bp, Artificial Sequence
  Synthetic polynucleotide
ggcggcggggctggcgcggc

SEQ ID NO: 4966 - DNA, 20 bp, Artificial Sequence
  Synthetic polynucleotide
gctcagcatctgtcagtcag

SEQ ID NO: 4967 - DNA, 20 bp, Artificial Sequence
  Synthetic polynucleotide
ctttcggcaaggcttcgacg

SEQ ID NO: 4968 - DNA, 20 bp, Artificial Sequence
  Synthetic polynucleotide
tgcccctactgcgaccgacc

SEQ ID NO: 4969 - DNA, 20 bp, Artificial Sequence
  Synthetic polynucleotide
gaggctgttctcaggatggt

SEQ ID NO: 4970 - DNA, 20 bp, Artificial Sequence
  Synthetic polynucleotide
aaggtgatctcgcagctagc

SEQ ID NO: 4971 - DNA, 20 bp, Artificial Sequence
  Synthetic polynucleotide
ccggacggcatgctgcttgc

SEQ ID NO: 4972 - DNA, 20 bp, Artificial Sequence
  Synthetic polynucleotide
gcgggaccagcaggaccagc

SEQ ID NO: 4973 - DNA, 20 bp, Artificial Sequence
  Synthetic polynucleotide
ccatttcctgtaagcaagcc

SEQ ID NO: 4974 - DNA, 20 bp, Artificial Sequence
  Synthetic polynucleotide
ggaactgtgcgctggtgcgc

SEQ ID NO: 4975 - DNA, 20 bp, Artificial Sequence
  Synthetic polynucleotide
tcatcgtacctctcgggtcc

SEQ ID NO: 4976 - DNA, 20 bp, Artificial Sequence
  Synthetic polynucleotide
gaatttctggatttgcgggc

SEQ ID NO: 4977 - DNA, 20 bp, Artificial Sequence
  Synthetic polynucleotide
attttatgggctaggtcggt

SEQ ID NO: 4978 - DNA, 20 bp, Artificial Sequence
  Synthetic polynucleotide
taaaaggtataaaattttta

SEQ ID NO: 4979 - DNA, 20 bp, Artificial Sequence
  Synthetic polynucleotide
tgtgccacatggctcccaca

SEQ ID NO: 4980 - DNA, 20 bp, Artificial Sequence
  Synthetic polynucleotide
tttggcaggagctgctgggc

SEQ ID NO: 4981 - DNA, 20 bp, Artificial Sequence
  Synthetic polynucleotide
agcgctgggctgtgggcagt

SEQ ID NO: 4982 - DNA, 20 bp, Artificial Sequence
  Synthetic polynucleotide
aactcaggttcggttttaat

SEQ ID NO: 4983 - DNA, 20 bp, Artificial Sequence
  Synthetic polynucleotide
gccatgtacagcgagcgagc

SEQ ID NO: 4984 - DNA, 20 bp, Artificial Sequence
  Synthetic polynucleotide
gctgggccttccatttagct

SEQ ID NO: 4985 - DNA, 20 bp, Artificial Sequence
  Synthetic polynucleotide
gacacaggcgtcgctgacac

SEQ ID NO: 4986 - DNA, 20 bp, Artificial Sequence
  Synthetic polynucleotide
ctttgtggtggacatgatga

SEQ ID NO: 4987 - DNA, 20 bp, Artificial Sequence
  Synthetic polynucleotide
ggccctggtctcggcggcgg

SEQ ID NO: 4988 - DNA, 20 bp, Artificial Sequence
  Synthetic polynucleotide
aagggggcggaggcctggca

SEQ ID NO: 4989 - DNA, 20 bp, Artificial Sequence
  Synthetic polynucleotide
tgccctgcctgtgaggggag

SEQ ID NO: 4990 - DNA, 20 bp, Artificial Sequence
  Synthetic polynucleotide
gcagggtcagcctggaggcc

SEQ ID NO: 4991 - DNA, 20 bp, Artificial Sequence
  Synthetic polynucleotide
cggccctggacgtgggtacg

SEQ ID NO: 4992 - DNA, 20 bp, Artificial Sequence
  Synthetic polynucleotide
ctacatcccgcagagcgcag

SEQ ID NO: 4993 - DNA, 20 bp, Artificial Sequence
  Synthetic polynucleotide
agcggtgcatgggctgcgca

SEQ ID NO: 4994 - DNA, 20 bp, Artificial Sequence
  Synthetic polynucleotide
tggggccgggccgggccggc

SEQ ID NO: 4995 - DNA, 20 bp, Artificial Sequence
  Synthetic polynucleotide
tgggagcagcaggtgtcgat

SEQ ID NO: 4996 - DNA, 20 bp, Artificial Sequence
  Synthetic polynucleotide
gcattgcagtgacggatgga

SEQ ID NO: 4997 - DNA, 20 bp, Artificial Sequence
  Synthetic polynucleotide
ccacgctggtgctgcagggc

SEQ ID NO: 4998 - DNA, 20 bp, Artificial Sequence
  Synthetic polynucleotide
cagtcgcagtagtagctggc

SEQ ID NO: 4999 - DNA, 20 bp, Artificial Sequence
  Synthetic polynucleotide
gctgctccaggaagtcggct

SEQ ID NO: 5000 - DNA, 20 bp, Artificial Sequence
  Synthetic polynucleotide
tgaacttacagatgggtggg

SEQ ID NO: 5001 - DNA, 20 bp, Artificial Sequence
  Synthetic polynucleotide
gtgacaggaggaacggagga

SEQ ID NO: 5002 - DNA, 20 bp, Artificial Sequence
  Synthetic polynucleotide
gcaacttgacaataaaagaa

SEQ ID NO: 5003 - DNA, 20 bp, Artificial Sequence
  Synthetic polynucleotide
tgcggtccgggactgcggtc

SEQ ID NO: 5004 - DNA, 20 bp, Artificial Sequence
  Synthetic polynucleotide
caatgaacttacgcttggta

SEQ ID NO: 5005 - DNA, 20 bp, Artificial Sequence
  Synthetic polynucleotide
gcaggagactactggactac

SEQ ID NO: 5006 - DNA, 20 bp, Artificial Sequence
  Synthetic polynucleotide
ggtcggcgggcgcagccggt

SEQ ID NO: 5007 - DNA, 20 bp, Artificial Sequence
  Synthetic polynucleotide
tttttgtttcctttataata

SEQ ID NO: 5008 - DNA, 20 bp, Artificial Sequence
  Synthetic polynucleotide
cagaaagggatggcgcggcg

SEQ ID NO: 5009 - DNA, 20 bp, Artificial Sequence
  Synthetic polynucleotide
tgttgggctttagcattagc

SEQ ID NO: 5010 - DNA, 20 bp, Artificial Sequence
  Synthetic polynucleotide
gggcttgatgagtggtcggt

SEQ ID NO: 5011 - DNA, 20 bp, Artificial Sequence
  Synthetic polynucleotide
tctggtcctgttggtcctgt

SEQ ID NO: 5012 - DNA, 20 bp, Artificial Sequence
  Synthetic polynucleotide
gcgccgccaggtgcgggtgc

SEQ ID NO: 5013 - DNA, 20 bp, Artificial Sequence
  Synthetic polynucleotide
cgaaagccggggagtgagtg

SEQ ID NO: 5014 - DNA, 20 bp, Artificial Sequence
  Synthetic polynucleotide
tggcactcttacttacttac

SEQ ID NO: 5015 - DNA, 20 bp, Artificial Sequence
  Synthetic polynucleotide
agtcctgctgatgctagcta

SEQ ID NO: 5016 - DNA, 20 bp, Artificial Sequence
  Synthetic polynucleotide
ggcgaggagctgggaggagc

SEQ ID NO: 5017 - DNA, 20 bp, Artificial Sequence
  Synthetic polynucleotide
aattggggacatgggcttcg

SEQ ID NO: 5018 - DNA, 20 bp, Artificial Sequence
  Synthetic polynucleotide
acctcctccagccagccagc

SEQ ID NO: 5019 - DNA, 20 bp, Artificial Sequence
  Synthetic polynucleotide
cggaatactggttgtttgtt

SEQ ID NO: 5020 - DNA, 20 bp, Artificial Sequence
  Synthetic polynucleotide
caggccttcgaggaggtcta

SEQ ID NO: 5021 - DNA, 20 bp, Artificial Sequence
  Synthetic polynucleotide
aagtggcggccgattgttgt

SEQ ID NO: 5022 - DNA, 20 bp, Artificial Sequence
  Synthetic polynucleotide
cacccagcgagagggccgag

SEQ ID NO: 5023 - DNA, 20 bp, Artificial Sequence
  Synthetic polynucleotide
tgtgaaagatgggtccggtc

SEQ ID NO: 5024 - DNA, 20 bp, Artificial Sequence
  Synthetic polynucleotide
aatgtcaaaacggagctgaa

SEQ ID NO: 5025 - DNA, 20 bp, Artificial Sequence
  Synthetic polynucleotide
gaagagggagagggaggcga

SEQ ID NO: 5026 - DNA, 20 bp, Artificial Sequence
  Synthetic polynucleotide
aggcggtcggcgggcgcggt

SEQ ID NO: 5027 - DNA, 20 bp, Artificial Sequence
  Synthetic polynucleotide
ctgggctgtttctgtggtga

SEQ ID NO: 5028 - DNA, 20 bp, Artificial Sequence
  Synthetic polynucleotide
ccttcttgctgacgtgctga

SEQ ID NO: 5029 - DNA, 20 bp, Artificial Sequence
  Synthetic polynucleotide
cccagccagcagcagcaggc

SEQ ID NO: 5030 - DNA, 20 bp, Artificial Sequence
  Synthetic polynucleotide
ggctcataccgcgtgtggtg

SEQ ID NO: 5031 - DNA, 20 bp, Artificial Sequence
  Synthetic polynucleotide
tacatttgcttgggagtcat

SEQ ID NO: 5032 - DNA, 20 bp, Artificial Sequence
  Synthetic polynucleotide
ccagttccagaagggcaata

SEQ ID NO: 5033 - DNA, 20 bp, Artificial Sequence
  Synthetic polynucleotide
cccgggaaggggcatgggaa

SEQ ID NO: 5034 - DNA, 20 bp, Artificial Sequence
  Synthetic polynucleotide
gggcatggctctctggggca

SEQ ID NO: 5035 - DNA, 20 bp, Artificial Sequence
  Synthetic polynucleotide
ccaggaggtgaggttgcagg

SEQ ID NO: 5036 - DNA, 20 bp, Artificial Sequence
  Synthetic polynucleotide
caagcagtgaggaatcagtg

SEQ ID NO: 5037 - DNA, 20 bp, Artificial Sequence
  Synthetic polynucleotide
tggctctgtggctggctctg

SEQ ID NO: 5038 - DNA, 20 bp, Artificial Sequence
  Synthetic polynucleotide
cgccccttggggccaccctg

SEQ ID NO: 5039 - DNA, 20 bp, Artificial Sequence
  Synthetic polynucleotide
gtcgccccctgggctcacct

SEQ ID NO: 5040 - DNA, 20 bp, Artificial Sequence
  Synthetic polynucleotide
gcgctgctgctgctgcttgc

SEQ ID NO: 5041 - DNA, 20 bp, Artificial Sequence
  Synthetic polynucleotide
ctcctacagggtaataatgt

SEQ ID NO: 5042 - DNA, 20 bp, Artificial Sequence
  Synthetic polynucleotide
gtccgcctctggtccgcctc

SEQ ID NO: 5043 - DNA, 20 bp, Artificial Sequence
  Synthetic polynucleotide
gctgtagtcgtgggcagtcg

SEQ ID NO: 5044 - DNA, 20 bp, Artificial Sequence
  Synthetic polynucleotide
tcaggagagcacgagagatc

SEQ ID NO: 5045 - DNA, 20 bp, Artificial Sequence
  Synthetic polynucleotide
atatccctcagtacaggagc

SEQ ID NO: 5046 - DNA, 20 bp, Artificial Sequence
  Synthetic polynucleotide
caacatggcagcagccaaca

SEQ ID NO: 5047 - DNA, 20 bp, Artificial Sequence
  Synthetic polynucleotide
cagctggagtggatgccagc

SEQ ID NO: 5048 - DNA, 20 bp, Artificial Sequence
  Synthetic polynucleotide
tgctgcagatccgtgggcgt

SEQ ID NO: 5049 - DNA, 20 bp, Artificial Sequence
  Synthetic polynucleotide
catgggcatgcagggcatgc

SEQ ID NO: 5050 - DNA, 20 bp, Artificial Sequence
  Synthetic polynucleotide
caactgctaaagcaagaaag

SEQ ID NO: 5051 - DNA, 20 bp, Artificial Sequence
  Synthetic polynucleotide
ccctacgtggagcccaacac

SEQ ID NO: 5052 - DNA, 20 bp, Artificial Sequence
  Synthetic polynucleotide
ctcgctcattcactccctcc

SEQ ID NO: 5053 - DNA, 20 bp, Artificial Sequence
  Synthetic polynucleotide
ccacccacctggcggtgggg

SEQ ID NO: 5054 - DNA, 20 bp, Artificial Sequence
  Synthetic polynucleotide
gcctcgatgtcgtcggccgt

SEQ ID NO: 5055 - DNA, 20 bp, Artificial Sequence
  Synthetic polynucleotide
gcatgcccagctggtccagc

SEQ ID NO: 5056 - DNA, 20 bp, Artificial Sequence
  Synthetic polynucleotide
tgcgcataggcctgggccct

SEQ ID NO: 5057 - DNA, 20 bp, Artificial Sequence
  Synthetic polynucleotide
tggccctacctgaaggctga

SEQ ID NO: 5058 - DNA, 20 bp, Artificial Sequence
  Synthetic polynucleotide
cccatgggtgggctatatat

SEQ ID NO: 5059 - DNA, 20 bp, Artificial Sequence
  Synthetic polynucleotide
aggcacgagcggcgcacgag

SEQ ID NO: 5060 - DNA, 20 bp, Artificial Sequence
  Synthetic polynucleotide
aagatcaagtttttggtttt

SEQ ID NO: 5061 - DNA, 20 bp, Artificial Sequence
  Synthetic polynucleotide
agcagcagcggcagcagcag

SEQ ID NO: 5062 - DNA, 20 bp, Artificial Sequence
  Synthetic polynucleotide
tcttgtattctaattccctt

SEQ ID NO: 5063 - DNA, 20 bp, Artificial Sequence
  Synthetic polynucleotide
gcgttcgcaggacgggcgac

SEQ ID NO: 5064 - DNA, 20 bp, Artificial Sequence
  Synthetic polynucleotide
aggaatatgactatatgact

SEQ ID NO: 5065 - DNA, 20 bp, Artificial Sequence
  Synthetic polynucleotide
gatctcaacagaaggtggtg

SEQ ID NO: 5066 - DNA, 20 bp, Artificial Sequence
  Synthetic polynucleotide
aggcaccggggtggtggtgg

SEQ ID NO: 5067 - DNA, 20 bp, Artificial Sequence
  Synthetic polynucleotide
tagagtgtcccatctgcatc

SEQ ID NO: 5068 - DNA, 20 bp, Artificial Sequence
  Synthetic polynucleotide
ctgcaaggacaaatctgaca

SEQ ID NO: 5069 - DNA, 20 bp, Artificial Sequence
  Synthetic polynucleotide
ccgccactcgagcgtgcgtg

SEQ ID NO: 5070 - DNA, 20 bp, Artificial Sequence
  Synthetic polynucleotide
ttccacaccttcgctggaga

SEQ ID NO: 5071 - DNA, 20 bp, Artificial Sequence
  Synthetic polynucleotide
gacctcttccagtgggccgt

SEQ ID NO: 5072 - DNA, 20 bp, Artificial Sequence
  Synthetic polynucleotide
tcgaaggtctcgatggatgt

SEQ ID NO: 5073 - DNA, 20 bp, Artificial Sequence
  Synthetic polynucleotide
aggtcctgggcagaaggacc

SEQ ID NO: 5074 - DNA, 20 bp, Artificial Sequence
  Synthetic polynucleotide
aggtcgcggcagtggctggc

SEQ ID NO: 5075 - DNA, 20 bp, Artificial Sequence
  Synthetic polynucleotide
gaccatctacatagccagcc

SEQ ID NO: 5076 - DNA, 20 bp, Artificial Sequence
  Synthetic polynucleotide
gagtgaaacagggatctatc

SEQ ID NO: 5077 - DNA, 20 bp, Artificial Sequence
  Synthetic polynucleotide
agcggctggcggctggcggc

SEQ ID NO: 5078 - DNA, 20 bp, Artificial Sequence
  Synthetic polynucleotide
cctggagcacctggagcacc

SEQ ID NO: 5079 - DNA, 20 bp, Artificial Sequence
  Synthetic polynucleotide
atgagggacactatatgatg

SEQ ID NO: 5080 - DNA, 20 bp, Artificial Sequence
  Synthetic polynucleotide
accggccggccttcgccgac

SEQ ID NO: 5081 - DNA, 20 bp, Artificial Sequence
  Synthetic polynucleotide
ccgttcgcggcggacggcgg

SEQ ID NO: 5082 - DNA, 20 bp, Artificial Sequence
  Synthetic polynucleotide
tgggacttgcgcacgaacat

SEQ ID NO: 5083 - DNA, 20 bp, Artificial Sequence
  Synthetic polynucleotide
atgaatggacttcgacttca

SEQ ID NO: 5084 - DNA, 20 bp, Artificial Sequence
  Synthetic polynucleotide
actactataccggatggata

SEQ ID NO: 5085 - DNA, 20 bp, Artificial Sequence
  Synthetic polynucleotide
aggacaagcagattcattca

SEQ ID NO: 5086 - DNA, 20 bp, Artificial Sequence
  Synthetic polynucleotide
ctcaaggaggttgtggtggt

SEQ ID NO: 5087 - DNA, 20 bp, Artificial Sequence
  Synthetic polynucleotide
cggcgggccacactctgcct

SEQ ID NO: 5088 - DNA, 20 bp, Artificial Sequence
  Synthetic polynucleotide
cgtgcggcccgccgcgagtg

SEQ ID NO: 5089 - DNA, 20 bp, Artificial Sequence
  Synthetic polynucleotide
tctgccgggtggaggtccgc

SEQ ID NO: 5090 - DNA, 20 bp, Artificial Sequence
  Synthetic polynucleotide
ggcggccggaagggcgcggc

SEQ ID NO: 5091 - DNA, 20 bp, Artificial Sequence
  Synthetic polynucleotide
caccaaggaaaggagcacca

SEQ ID NO: 5092 - DNA, 20 bp, Artificial Sequence
  Synthetic polynucleotide
cggtgctgccgctcgtgctt

SEQ ID NO: 5093 - DNA, 20 bp, Artificial Sequence
  Synthetic polynucleotide
ggcgggatgagtgcggtgtg

SEQ ID NO: 5094 - DNA, 20 bp, Artificial Sequence
  Synthetic polynucleotide
acgccctggagaaggaggga

SEQ ID NO: 5095 - DNA, 20 bp, Artificial Sequence
  Synthetic polynucleotide
ggcgcctgccccggccggcc

SEQ ID NO: 5096 - DNA, 20 bp, Artificial Sequence
  Synthetic polynucleotide
tggacgggctgcagggtggt

SEQ ID NO: 5097 - DNA, 20 bp, Artificial Sequence
  Synthetic polynucleotide
cctttggcacagcggcacag

SEQ ID NO: 5098 - DNA, 20 bp, Artificial Sequence
  Synthetic polynucleotide
tcctgctgtccctaggaccc

SEQ ID NO: 5099 - DNA, 20 bp, Artificial Sequence
  Synthetic polynucleotide
ggcaccgcataggggagggg

SEQ ID NO: 5100 - DNA, 20 bp, Artificial Sequence
  Synthetic polynucleotide
acctactgtccccagaggag

SEQ ID NO: 5101 - DNA, 20 bp, Artificial Sequence
  Synthetic polynucleotide
agcgcatgaggatgcgcatg

SEQ ID NO: 5102 - DNA, 20 bp, Artificial Sequence
  Synthetic polynucleotide
ttcctcgccccacggctcca

SEQ ID NO: 5103 - DNA, 20 bp, Artificial Sequence
  Synthetic polynucleotide
aaggcgctgctgctctgcgc

SEQ ID NO: 5104 - DNA, 20 bp, Artificial Sequence
  Synthetic polynucleotide
cctggtgctcctggtgctcc

SEQ ID NO: 5105 - DNA, 20 bp, Artificial Sequence
  Synthetic polynucleotide
gggccgggcccggccgggcc

SEQ ID NO: 5106 - DNA, 20 bp, Artificial Sequence
  Synthetic polynucleotide
gggacccaggcacttctgca

SEQ ID NO: 5107 - DNA, 20 bp, Artificial Sequence
  Synthetic polynucleotide
tactgtcggatttctgctgt

SEQ ID NO: 5108 - DNA, 20 bp, Artificial Sequence
  Synthetic polynucleotide
cggagtgaatcagctcagct

SEQ ID NO: 5109 - DNA, 20 bp, Artificial Sequence
  Synthetic polynucleotide
aaggcggaatggtggtggag

SEQ ID NO: 5110 - DNA, 20 bp, Artificial Sequence
  Synthetic polynucleotide
gtggctggcgcaggcgggcg

SEQ ID NO: 5111 - DNA, 20 bp, Artificial Sequence
  Synthetic polynucleotide
gggctggcgcggggctggcg

SEQ ID NO: 5112 - DNA, 20 bp, Artificial Sequence
  Synthetic polynucleotide
tggggccctgggggaagcct

SEQ ID NO: 5113 - DNA, 20 bp, Artificial Sequence
  Synthetic polynucleotide
gggctttctttccgaggccg

SEQ ID NO: 5114 - DNA, 20 bp, Artificial Sequence
  Synthetic polynucleotide
catgaccttcctgcagccag

SEQ ID NO: 5115 - DNA, 20 bp, Artificial Sequence
  Synthetic polynucleotide
ctgaaggggaaggctcgaag

SEQ ID NO: 5116 - DNA, 20 bp, Artificial Sequence
  Synthetic polynucleotide
acgttgccaaagtagtcagt

SEQ ID NO: 5117 - DNA, 20 bp, Artificial Sequence
  Synthetic polynucleotide
cagggcagcgatgcactcac

SEQ ID NO: 5118 - DNA, 20 bp, Artificial Sequence
  Synthetic polynucleotide
ccgtttcataggaaatgggt

SEQ ID NO: 5119 - DNA, 20 bp, Artificial Sequence
  Synthetic polynucleotide
ctcccgagttctgggaggga

SEQ ID NO: 5120 - DNA, 20 bp, Artificial Sequence
  Synthetic polynucleotide
ttggccatgctgatgttggt

SEQ ID NO: 5121 - DNA, 20 bp, Artificial Sequence
  Synthetic polynucleotide
aatggtcttgtgaagggtga

SEQ ID NO: 5122 - DNA, 20 bp, Artificial Sequence
  Synthetic polynucleotide
gctccgcgcttgagggcgga

SEQ ID NO: 5123 - DNA, 20 bp, Artificial Sequence
  Synthetic polynucleotide
gtgggagctggacctggacc

SEQ ID NO: 5124 - DNA, 20 bp, Artificial Sequence
  Synthetic polynucleotide
tgggcaaggtgtggcgggca

SEQ ID NO: 5125 - DNA, 20 bp, Artificial Sequence
  Synthetic polynucleotide
tgttccaggacagcaaggca

SEQ ID NO: 5126 - DNA, 20 bp, Artificial Sequence
  Synthetic polynucleotide
agcaaggtgcaggtgggtgc

SEQ ID NO: 5127 - DNA, 20 bp, Artificial Sequence
  Synthetic polynucleotide
ccggggtccaggcagcaggc

SEQ ID NO: 5128 - DNA, 20 bp, Artificial Sequence
  Synthetic polynucleotide
ctctttccccgtgccaggca

SEQ ID NO: 5129 - DNA, 20 bp, Artificial Sequence
  Synthetic polynucleotide
ctgtctccagcggtgcggtg

SEQ ID NO: 5130 - DNA, 20 bp, Artificial Sequence
  Synthetic polynucleotide
gcgggggtgcggccgaggcg

SEQ ID NO: 5131 - DNA, 20 bp, Artificial Sequence
  Synthetic polynucleotide
cgtaggcggcgggcggcgcg

SEQ ID NO: 5132 - DNA, 20 bp, Artificial Sequence
  Synthetic polynucleotide
caggaacagcaggagggagc

SEQ ID NO: 5133 - DNA, 20 bp, Artificial Sequence
  Synthetic polynucleotide
gaccgcaagatggaggtggg

SEQ ID NO: 5134 - DNA, 20 bp, Artificial Sequence
  Synthetic polynucleotide
tcgttcctccgagctggagc

SEQ ID NO: 5135 - DNA, 20 bp, Artificial Sequence
  Synthetic polynucleotide
gtgacgcctcgctggagggc

SEQ ID NO: 5136 - DNA, 20 bp, Artificial Sequence
  Synthetic polynucleotide
ggcggagctgctggagctgc

SEQ ID NO: 5137 - DNA, 20 bp, Artificial Sequence
  Synthetic polynucleotide
agctgcggctgcagcagctg

SEQ ID NO: 5138 - DNA, 20 bp, Artificial Sequence
  Synthetic polynucleotide
ctcttgcctgcagggcaggc

SEQ ID NO: 5139 - DNA, 20 bp, Artificial Sequence
  Synthetic polynucleotide
aaggggctctgtggacagac

SEQ ID NO: 5140 - DNA, 20 bp, Artificial Sequence
  Synthetic polynucleotide
gtgcgaggtcggcatgaggt

SEQ ID NO: 5141 - DNA, 20 bp, Artificial Sequence
  Synthetic polynucleotide
tctgctttgctttgctttgc

SEQ ID NO: 5142 - DNA, 20 bp, Artificial Sequence
  Synthetic polynucleotide
tgtggctgcagctgtctgct

SEQ ID NO: 5143 - DNA, 20 bp, Artificial Sequence
  Synthetic polynucleotide
tgcactcaaagggcactcaa

SEQ ID NO: 5144 - DNA, 20 bp, Artificial Sequence
  Synthetic polynucleotide
tgtggtcggttctgcagatg

SEQ ID NO: 5145 - DNA, 20 bp, Artificial Sequence
  Synthetic polynucleotide
gtggtctgccagctaaataa

SEQ ID NO: 5146 - DNA, 20 bp, Artificial Sequence
  Synthetic polynucleotide
ccaacgaccatacccgtccg

SEQ ID NO: 5147 - DNA, 20 bp, Artificial Sequence
  Synthetic polynucleotide
tttggagggaaagtagagag

SEQ ID NO: 5148 - DNA, 20 bp, Artificial Sequence
  Synthetic polynucleotide
ttctagcggccatcgaggga

SEQ ID NO: 5149 - DNA, 20 bp, Artificial Sequence
  Synthetic polynucleotide
gactctcgttctctcaggac

SEQ ID NO: 5150 - DNA, 20 bp, Artificial Sequence
  Synthetic polynucleotide
cttcggctacagctacagct

SEQ ID NO: 5151 - DNA, 20 bp, Artificial Sequence
  Synthetic polynucleotide
gccagggccctgcgcgtgta

SEQ ID NO: 5152 - DNA, 20 bp, Artificial Sequence
  Synthetic polynucleotide
tgcttggagcagggggtgct

SEQ ID NO: 5153 - DNA, 20 bp, Artificial Sequence
  Synthetic polynucleotide
cctggacttccagctggtgg

SEQ ID NO: 5154 - DNA, 20 bp, Artificial Sequence
  Synthetic polynucleotide
ggagatggaggccgggaggc

SEQ ID NO: 5155 - DNA, 20 bp, Artificial Sequence
  Synthetic polynucleotide
tgcgtggcacgatacctgcg

SEQ ID NO: 5156 - DNA, 20 bp, Artificial Sequence
  Synthetic polynucleotide
cctggtccccctggtccccc

SEQ ID NO: 5157 - DNA, 20 bp, Artificial Sequence
  Synthetic polynucleotide
ctgaacagccaggtagcgag

SEQ ID NO: 5158 - DNA, 20 bp, Artificial Sequence
  Synthetic polynucleotide
cggttggtctgttgtgactc

SEQ ID NO: 5159 - DNA, 20 bp, Artificial Sequence
  Synthetic polynucleotide
agggggtgcagggccggccg

SEQ ID NO: 5160 - DNA, 20 bp, Artificial Sequence
  Synthetic polynucleotide
accagcgattacgacgacgt

SEQ ID NO: 5161 - DNA, 20 bp, Artificial Sequence
  Synthetic polynucleotide
ggtggcggtgttgtacgtgg

SEQ ID NO: 5162 - DNA, 20 bp, Artificial Sequence
  Synthetic polynucleotide
tgggcggcggcggcgcggcg

SEQ ID NO: 5163 - DNA, 20 bp, Artificial Sequence
  Synthetic polynucleotide
tatctgaaaaattggaaaat

SEQ ID NO: 5164 - DNA, 20 bp, Artificial Sequence
  Synthetic polynucleotide
tggacgggctgcagggctgc

SEQ ID NO: 5165 - DNA, 20 bp, Artificial Sequence
  Synthetic polynucleotide
gtcggcgcagacactgggtt

SEQ ID NO: 5166 - DNA, 20 bp, Artificial Sequence
  Synthetic polynucleotide
ttttagcctccacaggcgag

SEQ ID NO: 5167 - DNA, 20 bp, Artificial Sequence
  Synthetic polynucleotide
ctttacgtaaatcgtaaatg

SEQ ID NO: 5168 - DNA, 20 bp, Artificial Sequence
  Synthetic polynucleotide
agcggcggcggcagcggcgg

SEQ ID NO: 5169 - DNA, 20 bp, Artificial Sequence
  Synthetic polynucleotide
aagccgcagacgtcggccgt

SEQ ID NO: 5170 - DNA, 20 bp, Artificial Sequence
  Synthetic polynucleotide
gttggaaacagtctagtctt

SEQ ID NO: 5171 - DNA, 20 bp, Artificial Sequence
  Synthetic polynucleotide
acactggatatttgagccac

SEQ ID NO: 5172 - DNA, 20 bp, Artificial Sequence
  Synthetic polynucleotide
ccggcggtggggcggtgggg

SEQ ID NO: 5173 - DNA, 20 bp, Artificial Sequence
  Synthetic polynucleotide
catccgttggacacctccgt

SEQ ID NO: 5174 - DNA, 20 bp, Artificial Sequence
  Synthetic polynucleotide
ccttgtgggggccagccaga

SEQ ID NO: 5175 - DNA, 20 bp, Artificial Sequence
  Synthetic polynucleotide
ccggatgtagatcttccacc

SEQ ID NO: 5176 - DNA, 20 bp, Artificial Sequence
  Synthetic polynucleotide
agctttgataccactcggct

SEQ ID NO: 5177 - DNA, 20 bp, Artificial Sequence
  Synthetic polynucleotide
ctgggctgtgaatgagggag

SEQ ID NO: 5178 - DNA, 20 bp, Artificial Sequence
  Synthetic polynucleotide
agcggagggcgcggggcgcg

SEQ ID NO: 5179 - DNA, 20 bp, Artificial Sequence
  Synthetic polynucleotide
tgcaggtatgtcctatgtcc

SEQ ID NO: 5180 - DNA, 20 bp, Artificial Sequence
  Synthetic polynucleotide
cttctgtgaaatgtttgttt

SEQ ID NO: 5181 - DNA, 20 bp, Artificial Sequence
  Synthetic polynucleotide
tggcgggggcggcggcgggg

SEQ ID NO: 5182 - DNA, 20 bp, Artificial Sequence
  Synthetic polynucleotide
aggaggtgggggctggggcg

SEQ ID NO: 5183 - DNA, 20 bp, Artificial Sequence
  Synthetic polynucleotide
aacagtgatctacagtgatc

SEQ ID NO: 5184 - DNA, 20 bp, Artificial Sequence
  Synthetic polynucleotide
ctgagaaggttgccccgaga

SEQ ID NO: 5185 - DNA, 20 bp, Artificial Sequence
  Synthetic polynucleotide
cagaaggcagctggcgggga

SEQ ID NO: 5186 - DNA, 20 bp, Artificial Sequence
  Synthetic polynucleotide
aggatgacgctcctgaggcc

SEQ ID NO: 5187 - DNA, 20 bp, Artificial Sequence
  Synthetic polynucleotide
tccacatctttctgtataaa

SEQ ID NO: 5188 - DNA, 20 bp, Artificial Sequence
  Synthetic polynucleotide
ctgctgccggcactggacac

SEQ ID NO: 5189 - DNA, 20 bp, Artificial Sequence
  Synthetic polynucleotide
tctgctgggctgttgatgag

SEQ ID NO: 5190 - DNA, 20 bp, Artificial Sequence
  Synthetic polynucleotide
gccggaacagcacggaatcc

SEQ ID NO: 5191 - DNA, 20 bp, Artificial Sequence
  Synthetic polynucleotide
taaaggaatttatgaattta

SEQ ID NO: 5192 - DNA, 20 bp, Artificial Sequence
  Synthetic polynucleotide
acatcaagcgccgggacatc

SEQ ID NO: 5193 - DNA, 20 bp, Artificial Sequence
  Synthetic polynucleotide
cactaccccccgcggaagag

SEQ ID NO: 5194 - DNA, 20 bp, Artificial Sequence
  Synthetic polynucleotide
aagctggcgggaccacacac

SEQ ID NO: 5195 - DNA, 20 bp, Artificial Sequence
  Synthetic polynucleotide
cgggggagctgcagtccgtc

SEQ ID NO: 5196 - DNA, 20 bp, Artificial Sequence
  Synthetic polynucleotide
tgtgctcactctgccaggcc

SEQ ID NO: 5197 - DNA, 20 bp, Artificial Sequence
  Synthetic polynucleotide
caaggaaaagccaggcccca

SEQ ID NO: 5198 - DNA, 20 bp, Artificial Sequence
  Synthetic polynucleotide
cttatggcagaattggccat

SEQ ID NO: 5199 - DNA, 20 bp, Artificial Sequence
  Synthetic polynucleotide
ttcagctcctgcatggtgca

SEQ ID NO: 5200 - DNA, 20 bp, Artificial Sequence
  Synthetic polynucleotide
gagaggagctggacttgctg

SEQ ID NO: 5201 - DNA, 20 bp, Artificial Sequence
  Synthetic polynucleotide
tgtccgcggcatgcggcatg

SEQ ID NO: 5202 - DNA, 20 bp, Artificial Sequence
  Synthetic polynucleotide
atgctcaatctgatagaaga

SEQ ID NO: 5203 - DNA, 20 bp, Artificial Sequence
  Synthetic polynucleotide
tcaggctccccaaccaggca

SEQ ID NO: 5204 - DNA, 20 bp, Artificial Sequence
  Synthetic polynucleotide
cggggggcggcggcggccgg

SEQ ID NO: 5205 - DNA, 20 bp, Artificial Sequence
  Synthetic polynucleotide
tgtaggggttcagcagggca

SEQ ID NO: 5206 - DNA, 20 bp, Artificial Sequence
  Synthetic polynucleotide
atgaagaaaagaaaagaaaa

SEQ ID NO: 5207 - DNA, 20 bp, Artificial Sequence
  Synthetic polynucleotide
actccccggctttcggcttt

SEQ ID NO: 5208 - DNA, 20 bp, Artificial Sequence
  Synthetic polynucleotide
ggtggcgggctgggccagcc

SEQ ID NO: 5209 - DNA, 20 bp, Artificial Sequence
  Synthetic polynucleotide
gtcttccagctggggaatgt

SEQ ID NO: 5210 - DNA, 20 bp, Artificial Sequence
  Synthetic polynucleotide
aataaaagaaaagaaaagat

SEQ ID NO: 5211 - DNA, 20 bp, Artificial Sequence
  Synthetic polynucleotide
tccattgtctcctcgaggtc

SEQ ID NO: 5212 - DNA, 20 bp, Artificial Sequence
  Synthetic polynucleotide
cgtggtctcggtcattggcg

SEQ ID NO: 5213 - DNA, 20 bp, Artificial Sequence
  Synthetic polynucleotide
aggaccgggagcaccaggac

SEQ ID NO: 5214 - DNA, 20 bp, Artificial Sequence
  Synthetic polynucleotide
cggctgcagcagcagccagc

SEQ ID NO: 5215 - DNA, 20 bp, Artificial Sequence
  Synthetic polynucleotide
ctccttccacggcacctgcc

SEQ ID NO: 5216 - DNA, 20 bp, Artificial Sequence
  Synthetic polynucleotide
gtgggcgagtgtcggtcttc

SEQ ID NO: 5217 - DNA, 20 bp, Artificial Sequence
  Synthetic polynucleotide
ctggacaaggctgggctccc

SEQ ID NO: 5218 - DNA, 20 bp, Artificial Sequence
  Synthetic polynucleotide
ggcggaggcggaggcggagg

SEQ ID NO: 5219 - DNA, 20 bp, Artificial Sequence
  Synthetic polynucleotide
ggtccgggcgtgcgggcgtg

SEQ ID NO: 5220 - DNA, 20 bp, Artificial Sequence
  Synthetic polynucleotide
gttgggagcaacaagtgatg

SEQ ID NO: 5221 - DNA, 20 bp, Artificial Sequence
  Synthetic polynucleotide
ctgggcccgggcccgggccc

SEQ ID NO: 5222 - DNA, 20 bp, Artificial Sequence
  Synthetic polynucleotide
gagctgccccggagccgccc

SEQ ID NO: 5223 - DNA, 20 bp, Artificial Sequence
  Synthetic polynucleotide
tgcgcgcgcgcgccgcgccg

SEQ ID NO: 5224 - DNA, 20 bp, Artificial Sequence
  Synthetic polynucleotide
ggccccggggcgacgcgacg

SEQ ID NO: 5225 - DNA, 20 bp, Artificial Sequence
  Synthetic polynucleotide
gcattgcacaggtattgcac

SEQ ID NO: 5226 - DNA, 20 bp, Artificial Sequence
  Synthetic polynucleotide
agcggcagccgcggcagcag

SEQ ID NO: 5227 - DNA, 20 bp, Artificial Sequence
  Synthetic polynucleotide
gcctgaaaaatggtacagtc

SEQ ID NO: 5228 - DNA, 20 bp, Artificial Sequence
  Synthetic polynucleotide
ggcttccaccagggaagaca

SEQ ID NO: 5229 - DNA, 20 bp, Artificial Sequence
  Synthetic polynucleotide
agacgcaggaagaaagacgc

SEQ ID NO: 5230 - DNA, 20 bp, Artificial Sequence
  Synthetic polynucleotide
tcttacccacacactttggt

SEQ ID NO: 5231 - DNA, 20 bp, Artificial Sequence
  Synthetic polynucleotide
cttcccggtgctgtggtctg

SEQ ID NO: 5232 - DNA, 20 bp, Artificial Sequence
  Synthetic polynucleotide
ttaatgacaaggaaattaat

SEQ ID NO: 5233 - DNA, 20 bp, Artificial Sequence
  Synthetic polynucleotide
gaaggcagggacttgacttg

SEQ ID NO: 5234 - DNA, 20 bp, Artificial Sequence
  Synthetic polynucleotide
catgggcgcgcgcgcccaca

SEQ ID NO: 5235 - DNA, 20 bp, Artificial Sequence
  Synthetic polynucleotide
caggcagccgagaaggtcgc

SEQ ID NO: 5236 - DNA, 20 bp, Artificial Sequence
  Synthetic polynucleotide
ccatcaccaacaacattgat

SEQ ID NO: 5237 - DNA, 20 bp, Artificial Sequence
  Synthetic polynucleotide
ctttgtggcggaactggggg

SEQ ID NO: 5238 - DNA, 20 bp, Artificial Sequence
  Synthetic polynucleotide
gacggtgaagacggttaaga

SEQ ID NO: 5239 - DNA, 20 bp, Artificial Sequence
  Synthetic polynucleotide
gtatcttggactggacatct

SEQ ID NO: 5240 - DNA, 20 bp, Artificial Sequence
  Synthetic polynucleotide
ctgttgctgctgctgctgct

SEQ ID NO: 5241 - DNA, 20 bp, Artificial Sequence
  Synthetic polynucleotide
accattttgtgtttgtttga

SEQ ID NO: 5242 - DNA, 20 bp, Artificial Sequence
  Synthetic polynucleotide
ttgaagtactgggggatgga

SEQ ID NO: 5243 - DNA, 20 bp, Artificial Sequence
  Synthetic polynucleotide
accacaggtgagcaccgacc

SEQ ID NO: 5244 - DNA, 20 bp, Artificial Sequence
  Synthetic polynucleotide
tcccccagtggattgggtgg

SEQ ID NO: 5245 - DNA, 20 bp, Artificial Sequence
  Synthetic polynucleotide
gtggttgggatggggctgga

SEQ ID NO: 5246 - DNA, 20 bp, Artificial Sequence
  Synthetic polynucleotide
cgctcatagagtaaactaac

SEQ ID NO: 5247 - DNA, 20 bp, Artificial Sequence
  Synthetic polynucleotide
ccgggagacggggctggaga

SEQ ID NO: 5248 - DNA, 20 bp, Artificial Sequence
  Synthetic polynucleotide
accagggcagctacggtttc

SEQ ID NO: 5249 - DNA, 20 bp, Artificial Sequence
  Synthetic polynucleotide
ttgcaccataagacttgact

SEQ ID NO: 5250 - DNA, 20 bp, Artificial Sequence
  Synthetic polynucleotide
tacaccgaggacgtggggtg

SEQ ID NO: 5251 - DNA, 20 bp, Artificial Sequence
  Synthetic polynucleotide
attttgtggattctattttg

SEQ ID NO: 5252 - DNA, 20 bp, Artificial Sequence
  Synthetic polynucleotide
tctccaggtctggtgtggcg

SEQ ID NO: 5253 - DNA, 20 bp, Artificial Sequence
  Synthetic polynucleotide
ttgttgcagatacatctatc

SEQ ID NO: 5254 - DNA, 20 bp, Artificial Sequence
  Synthetic polynucleotide
tccctgcccccaggagtgag

SEQ ID NO: 5255 - DNA, 20 bp, Artificial Sequence
  Synthetic polynucleotide
atcagtggggcgctggagtg

SEQ ID NO: 5256 - DNA, 20 bp, Artificial Sequence
  Synthetic polynucleotide
gaggagctcaacctgtgggt

SEQ ID NO: 5257 - DNA, 20 bp, Artificial Sequence
  Synthetic polynucleotide
ccctggagcgcaagttcccc

SEQ ID NO: 5258 - DNA, 20 bp, Artificial Sequence
  Synthetic polynucleotide
ctgcagtttggctacaacac

SEQ ID NO: 5259 - DNA, 20 bp, Artificial Sequence
  Synthetic polynucleotide
gcagttgaactctggaactc

SEQ ID NO: 5260 - DNA, 20 bp, Artificial Sequence
  Synthetic polynucleotide
gaggcttcagcaccagcagg

SEQ ID NO: 5261 - DNA, 20 bp, Artificial Sequence
  Synthetic polynucleotide
caggatgccgactggccagc

SEQ ID NO: 5262 - DNA, 20 bp, Artificial Sequence
  Synthetic polynucleotide
agagtgttcatctgggaatc

SEQ ID NO: 5263 - DNA, 20 bp, Artificial Sequence
  Synthetic polynucleotide
ccgtgtacgcaaagtcaaac

SEQ ID NO: 5264 - DNA, 20 bp, Artificial Sequence
  Synthetic polynucleotide
gaggaggaggaggaggaggg

SEQ ID NO: 5265 - DNA, 20 bp, Artificial Sequence
  Synthetic polynucleotide
ggtgcagctgtcggtggggt

SEQ ID NO: 5266 - DNA, 20 bp, Artificial Sequence
  Synthetic polynucleotide
catggccgtgagcacccgca

SEQ ID NO: 5267 - DNA, 20 bp, Artificial Sequence
  Synthetic polynucleotide
tgagcgagcgcaggcagcgc

SEQ ID NO: 5268 - DNA, 20 bp, Artificial Sequence
  Synthetic polynucleotide
cctctgagcctggaatctct

SEQ ID NO: 5269 - DNA, 20 bp, Artificial Sequence
  Synthetic polynucleotide
actgcaaggacaaatctgaa

SEQ ID NO: 5270 - DNA, 20 bp, Artificial Sequence
  Synthetic polynucleotide
caaggggatggtactctctc

SEQ ID NO: 5271 - DNA, 20 bp, Artificial Sequence
  Synthetic polynucleotide
ggctgcagctggccagcagc

SEQ ID NO: 5272 - DNA, 20 bp, Artificial Sequence
  Synthetic polynucleotide
gcagatcgcgcagatcgcgc

SEQ ID NO: 5273 - DNA, 20 bp, Artificial Sequence
  Synthetic polynucleotide
tccttcatgatggttcatga

SEQ ID NO: 5274 - DNA, 20 bp, Artificial Sequence
  Synthetic polynucleotide
gcagctgacagagggttaga

SEQ ID NO: 5275 - DNA, 20 bp, Artificial Sequence
  Synthetic polynucleotide
agctgtgcagagaaggcaga

SEQ ID NO: 5276 - DNA, 20 bp, Artificial Sequence
  Synthetic polynucleotide
gaggtccgctgctgcccccg

SEQ ID NO: 5277 - DNA, 20 bp, Artificial Sequence
  Synthetic polynucleotide
caccatggcaaacaggttct

SEQ ID NO: 5278 - DNA, 20 bp, Artificial Sequence
  Synthetic polynucleotide
actacgtggactgtggactg

SEQ ID NO: 5279 - DNA, 20 bp, Artificial Sequence
  Synthetic polynucleotide
tggcgcgccggcgccggcgc

SEQ ID NO: 5280 - DNA, 20 bp, Artificial Sequence
  Synthetic polynucleotide
gctgctgcagctgctgcagc

SEQ ID NO: 5281 - DNA, 20 bp, Artificial Sequence
  Synthetic polynucleotide
ttggcagtggtggcatgtgg

SEQ ID NO: 5282 - DNA, 20 bp, Artificial Sequence
  Synthetic polynucleotide
gggctgaggtcagtagtagt

SEQ ID NO: 5283 - DNA, 20 bp, Artificial Sequence
  Synthetic polynucleotide
acagggggactccgggactc

SEQ ID NO: 5284 - DNA, 20 bp, Artificial Sequence
  Synthetic polynucleotide
acagggtggagggtggaacg

SEQ ID NO: 5285 - DNA, 20 bp, Artificial Sequence
  Synthetic polynucleotide
ctcttcttggatgatgactc

SEQ ID NO: 5286 - DNA, 20 bp, Artificial Sequence
  Synthetic polynucleotide
tccacgtaaatgaagcgacg

SEQ ID NO: 5287 - DNA, 20 bp, Artificial Sequence
  Synthetic polynucleotide
cggcgcgggcggcggcggcg

SEQ ID NO: 5288 - DNA, 20 bp, Artificial Sequence
  Synthetic polynucleotide
gggaggcggcggaggggcgg

SEQ ID NO: 5289 - DNA, 20 bp, Artificial Sequence
  Synthetic polynucleotide
gcggacctcgggggcggcag

SEQ ID NO: 5290 - DNA, 20 bp, Artificial Sequence
  Synthetic polynucleotide
ttggcggcgtgtgctgtgcc

SEQ ID NO: 5291 - DNA, 20 bp, Artificial Sequence
  Synthetic polynucleotide
cccaacggttaccgttaccg

SEQ ID NO: 5292 - DNA, 20 bp, Artificial Sequence
  Synthetic polynucleotide
ccgccagagcgcgcggggcg

SEQ ID NO: 5293 - DNA, 20 bp, Artificial Sequence
  Synthetic polynucleotide
gcatgaagggctgggaggca

SEQ ID NO: 5294 - DNA, 20 bp, Artificial Sequence
  Synthetic polynucleotide
tgaaaacttgtctcgtctcc

SEQ ID NO: 5295 - DNA, 20 bp, Artificial Sequence
  Synthetic polynucleotide
catgtcaaggagatagatag

SEQ ID NO: 5296 - DNA, 20 bp, Artificial Sequence
  Synthetic polynucleotide
ggtgccattgacatgggcat

SEQ ID NO: 5297 - DNA, 20 bp, Artificial Sequence
  Synthetic polynucleotide
ctgctccacagggttcattc

SEQ ID NO: 5298 - DNA, 20 bp, Artificial Sequence
  Synthetic polynucleotide
aagctggaactctgggactc

SEQ ID NO: 5299 - DNA, 20 bp, Artificial Sequence
  Synthetic polynucleotide
cttctcatgtctccggtctc

SEQ ID NO: 5300 - DNA, 20 bp, Artificial Sequence
  Synthetic polynucleotide
gttgaatttccagcttcagg

SEQ ID NO: 5301 - DNA, 20 bp, Artificial Sequence
  Synthetic polynucleotide
tcaagttcttaggtattctt

SEQ ID NO: 5302 - DNA, 20 bp, Artificial Sequence
  Synthetic polynucleotide
ggcgaggtgttcgggcgctc

SEQ ID NO: 5303 - DNA, 20 bp, Artificial Sequence
  Synthetic polynucleotide
tctgaagaacagaacagaac

SEQ ID NO: 5304 - DNA, 20 bp, Artificial Sequence
  Synthetic polynucleotide
cctgggggtcttcctttgcc

SEQ ID NO: 5305 - DNA, 20 bp, Artificial Sequence
  Synthetic polynucleotide
agctctgcgtgaaccgaacc

SEQ ID NO: 5306 - DNA, 20 bp, Artificial Sequence
  Synthetic polynucleotide
cctccggatggttttggttt

SEQ ID NO: 5307 - DNA, 20 bp, Artificial Sequence
  Synthetic polynucleotide
tacctcagagcagttctggc

SEQ ID NO: 5308 - DNA, 20 bp, Artificial Sequence
  Synthetic polynucleotide
cagggtgccgtggggctggc

SEQ ID NO: 5309 - DNA, 20 bp, Artificial Sequence
  Synthetic polynucleotide
gctgctgctgctcgctgtag

SEQ ID NO: 5310 - DNA, 20 bp, Artificial Sequence
  Synthetic polynucleotide
cagcagcaggagggtcaagc

SEQ ID NO: 5311 - DNA, 20 bp, Artificial Sequence
  Synthetic polynucleotide
ttaaaactgtcttttaaaac

SEQ ID NO: 5312 - DNA, 20 bp, Artificial Sequence
  Synthetic polynucleotide
cacggcgttggtcagcgcgt

SEQ ID NO: 5313 - DNA, 20 bp, Artificial Sequence
  Synthetic polynucleotide
aattcccagcaacaggcaac

SEQ ID NO: 5314 - DNA, 20 bp, Artificial Sequence
  Synthetic polynucleotide
ctagacaatataaataaatc

SEQ ID NO: 5315 - DNA, 20 bp, Artificial Sequence
  Synthetic polynucleotide
agggcacatctgggtgcatc

SEQ ID NO: 5316 - DNA, 20 bp, Artificial Sequence
  Synthetic polynucleotide
aagaataggcacaatagaat

SEQ ID NO: 5317 - DNA, 20 bp, Artificial Sequence
  Synthetic polynucleotide
ggcccggaggctgggcggcc

SEQ ID NO: 5318 - DNA, 20 bp, Artificial Sequence
  Synthetic polynucleotide
gtcaccatcagcctcaatca

SEQ ID NO: 5319 - DNA, 20 bp, Artificial Sequence
  Synthetic polynucleotide
ttcctttagttgggattagt

SEQ ID NO: 5320 - DNA, 20 bp, Artificial Sequence
  Synthetic polynucleotide
gttggggttgggtttgggtt

SEQ ID NO: 5321 - DNA, 20 bp, Artificial Sequence
  Synthetic polynucleotide
cttgggggcgaggcggggcg

SEQ ID NO: 5322 - DNA, 20 bp, Artificial Sequence
  Synthetic polynucleotide
cagtgcctgcgcgatctgcg

SEQ ID NO: 5323 - DNA, 20 bp, Artificial Sequence
  Synthetic polynucleotide
agccttgactgttgagcagc

SEQ ID NO: 5324 - DNA, 20 bp, Artificial Sequence
  Synthetic polynucleotide
aggaagaaaagtatgtgaac

SEQ ID NO: 5325 - DNA, 20 bp, Artificial Sequence
  Synthetic polynucleotide
gtctatgtgctgtgctgtgc

SEQ ID NO: 5326 - DNA, 20 bp, Artificial Sequence
  Synthetic polynucleotide
tacgtcctcgctgcggcatg

SEQ ID NO: 5327 - DNA, 20 bp, Artificial Sequence
  Synthetic polynucleotide
tggggctggctggggctggc

SEQ ID NO: 5328 - DNA, 20 bp, Artificial Sequence
  Synthetic polynucleotide
aagcagaaggcgctgcatgc

SEQ ID NO: 5329 - DNA, 20 bp, Artificial Sequence
  Synthetic polynucleotide
cttgtccgtgcgcctgcctg

SEQ ID NO: 5330 - DNA, 20 bp, Artificial Sequence
  Synthetic polynucleotide
ttagaacatatcatctggtc

SEQ ID NO: 5331 - DNA, 20 bp, Artificial Sequence
  Synthetic polynucleotide
gcaaggtgggcagcagcagc

SEQ ID NO: 5332 - DNA, 20 bp, Artificial Sequence
  Synthetic polynucleotide
gattgtcactatatatatat

SEQ ID NO: 5333 - DNA, 20 bp, Artificial Sequence
  Synthetic polynucleotide
cagccatttcgaaaggcagg

SEQ ID NO: 5334 - DNA, 20 bp, Artificial Sequence
  Synthetic polynucleotide
ggcaccaggacgtatgggta

SEQ ID NO: 5335 - DNA, 20 bp, Artificial Sequence
  Synthetic polynucleotide
aagaactccttgatgcaggc

SEQ ID NO: 5336 - DNA, 20 bp, Artificial Sequence
  Synthetic polynucleotide
cgggacgcattcggggcggg

SEQ ID NO: 5337 - DNA, 20 bp, Artificial Sequence
  Synthetic polynucleotide
gcagggcttcccgcacattg

SEQ ID NO: 5338 - DNA, 20 bp, Artificial Sequence
  Synthetic polynucleotide
atgaggccagtggcagaggg

SEQ ID NO: 5339 - DNA, 20 bp, Artificial Sequence
  Synthetic polynucleotide
gcgcgtccaggtgcggcgtg

SEQ ID NO: 5340 - DNA, 20 bp, Artificial Sequence
  Synthetic polynucleotide
gagtcgtcggtgcggtggtg

SEQ ID NO: 5341 - DNA, 20 bp, Artificial Sequence
  Synthetic polynucleotide
gtcggaggagacgtagaggt

SEQ ID NO: 5342 - DNA, 20 bp, Artificial Sequence
  Synthetic polynucleotide
agggcaggcatgcactgcac

SEQ ID NO: 5343 - DNA, 20 bp, Artificial Sequence
  Synthetic polynucleotide
acatttttaaggtaattaat

SEQ ID NO: 5344 - DNA, 20 bp, Artificial Sequence
  Synthetic polynucleotide
aggcagcatacgcgacgcga

SEQ ID NO: 5345 - DNA, 20 bp, Artificial Sequence
  Synthetic polynucleotide
ttggtatgttatcgttggct

SEQ ID NO: 5346 - DNA, 20 bp, Artificial Sequence
  Synthetic polynucleotide
aggaggcagtggaagaatac

SEQ ID NO: 5347 - DNA, 20 bp, Artificial Sequence
  Synthetic polynucleotide
ggcctcggctggtgctgcct

SEQ ID NO: 5348 - DNA, 20 bp, Artificial Sequence
  Synthetic polynucleotide
ctgcaattgaggcaaaattg

SEQ ID NO: 5349 - DNA, 20 bp, Artificial Sequence
  Synthetic polynucleotide
cctgcgaacatacctagcta

SEQ ID NO: 5350 - DNA, 20 bp, Artificial Sequence
  Synthetic polynucleotide
tgacgtggcgtggcgtggcg

SEQ ID NO: 5351 - DNA, 20 bp, Artificial Sequence
  Synthetic polynucleotide
aggactctcccagccaacgt

SEQ ID NO: 5352 - DNA, 20 bp, Artificial Sequence
  Synthetic polynucleotide
tactggctctgaggtgtgtg

SEQ ID NO: 5353 - DNA, 20 bp, Artificial Sequence
  Synthetic polynucleotide
ggccacaggctctgggccac

SEQ ID NO: 5354 - DNA, 20 bp, Artificial Sequence
  Synthetic polynucleotide
gttcacggggattaccaacc

SEQ ID NO: 5355 - DNA, 20 bp, Artificial Sequence
  Synthetic polynucleotide
agctggctgggaacaccagc

SEQ ID NO: 5356 - DNA, 20 bp, Artificial Sequence
  Synthetic polynucleotide
gcggtgcggcggccgcgcgg

SEQ ID NO: 5357 - DNA, 20 bp, Artificial Sequence
  Synthetic polynucleotide
ttgggcgtcttgtgtcgccc

SEQ ID NO: 5358 - DNA, 20 bp, Artificial Sequence
  Synthetic polynucleotide
ggcgccctccgactgctggc

SEQ ID NO: 5359 - DNA, 20 bp, Artificial Sequence
  Synthetic polynucleotide
agatccaggcctgtggcatg

SEQ ID NO: 5360 - DNA, 20 bp, Artificial Sequence
  Synthetic polynucleotide
ggcggcggcggcggcggcgg

SEQ ID NO: 5361 - DNA, 20 bp, Artificial Sequence
  Synthetic polynucleotide
atcctggatgttgcacggca

SEQ ID NO: 5362 - DNA, 20 bp, Artificial Sequence
  Synthetic polynucleotide
cttcaggctggctggcaggc

SEQ ID NO: 5363 - DNA, 20 bp, Artificial Sequence
  Synthetic polynucleotide
tgactggctggccacggcca

SEQ ID NO: 5364 - DNA, 20 bp, Artificial Sequence
  Synthetic polynucleotide
atggctgcgctgggctgcgc

SEQ ID NO: 5365 - DNA, 20 bp, Artificial Sequence
  Synthetic polynucleotide
ggtgcaggaattgggctatg

SEQ ID NO: 5366 - DNA, 20 bp, Artificial Sequence
  Synthetic polynucleotide
agatgagaaggggaggagaa

SEQ ID NO: 5367 - DNA, 20 bp, Artificial Sequence
  Synthetic polynucleotide
gggccacagagatggcgggc

SEQ ID NO: 5368 - DNA, 20 bp, Artificial Sequence
  Synthetic polynucleotide
ctcatgagtatgaaactgac

SEQ ID NO: 5369 - DNA, 20 bp, Artificial Sequence
  Synthetic polynucleotide
aagttgtccttccgcaggcc

SEQ ID NO: 5370 - DNA, 20 bp, Artificial Sequence
  Synthetic polynucleotide
gaggcccggatgctgaaggg

SEQ ID NO: 5371 - DNA, 20 bp, Artificial Sequence
  Synthetic polynucleotide
gactggatcacagggatcac

SEQ ID NO: 5372 - DNA, 20 bp, Artificial Sequence
  Synthetic polynucleotide
tggccggggccgggggccgg

SEQ ID NO: 5373 - DNA, 20 bp, Artificial Sequence
  Synthetic polynucleotide
cgcagctgtaaaactggggg

SEQ ID NO: 5374 - DNA, 20 bp, Artificial Sequence
  Synthetic polynucleotide
caataaaagctgaggtgctg

SEQ ID NO: 5375 - DNA, 20 bp, Artificial Sequence
  Synthetic polynucleotide
agggtcgaggtaagggaaaa

SEQ ID NO: 5376 - DNA, 20 bp, Artificial Sequence
  Synthetic polynucleotide
gcaagctgggcggggggggg

SEQ ID NO: 5377 - DNA, 20 bp, Artificial Sequence
  Synthetic polynucleotide
aggaaaaggggatcgtggtg

SEQ ID NO: 5378 - DNA, 20 bp, Artificial Sequence
  Synthetic polynucleotide
tccccatggtgatgcaagca

SEQ ID NO: 5379 - DNA, 20 bp, Artificial Sequence
  Synthetic polynucleotide
cacggcgcgcgcgcgcgcgc

SEQ ID NO: 5380 - DNA, 20 bp, Artificial Sequence
  Synthetic polynucleotide
actgaagaggaaaaggataa

SEQ ID NO: 5381 - DNA, 20 bp, Artificial Sequence
  Synthetic polynucleotide
ggggaccgcgggggcggcgg

SEQ ID NO: 5382 - DNA, 20 bp, Artificial Sequence
  Synthetic polynucleotide
aactgtgtggtgatgcgacg

SEQ ID NO: 5383 - DNA, 20 bp, Artificial Sequence
  Synthetic polynucleotide
ggcagcggcggcagctgcag

SEQ ID NO: 5384 - DNA, 20 bp, Artificial Sequence
  Synthetic polynucleotide
tggcctgcacagactggtta

SEQ ID NO: 5385 - DNA, 20 bp, Artificial Sequence
  Synthetic polynucleotide
tggctacgcaggcaggcagg

SEQ ID NO: 5386 - DNA, 20 bp, Artificial Sequence
  Synthetic polynucleotide
tccaaagatggtcaaggtca

SEQ ID NO: 5387 - DNA, 20 bp, Artificial Sequence
  Synthetic polynucleotide
gactttaggcagaggctggc

SEQ ID NO: 5388 - DNA, 20 bp, Artificial Sequence
  Synthetic polynucleotide
ctgacgacgttccgacgttc

SEQ ID NO: 5389 - DNA, 20 bp, Artificial Sequence
  Synthetic polynucleotide
tggccgacagttggatggat

SEQ ID NO: 5390 - DNA, 20 bp, Artificial Sequence
  Synthetic polynucleotide
ggcggcgatgatagacaggt

SEQ ID NO: 5391 - DNA, 20 bp, Artificial Sequence
  Synthetic polynucleotide
gtatgggcggggccagggcg

SEQ ID NO: 5392 - DNA, 20 bp, Artificial Sequence
  Synthetic polynucleotide
acagaatggctcctctcctc

SEQ ID NO: 5393 - DNA, 20 bp, Artificial Sequence
  Synthetic polynucleotide
aacacgctgaagcgcacgca

SEQ ID NO: 5394 - DNA, 20 bp, Artificial Sequence
  Synthetic polynucleotide
ccaatgcaggcctcacacac

SEQ ID NO: 5395 - DNA, 20 bp, Artificial Sequence
  Synthetic polynucleotide
aacagaaaaaagagggaaag

SEQ ID NO: 5396 - DNA, 20 bp, Artificial Sequence
  Synthetic polynucleotide
cgttctttggggccatcatc

SEQ ID NO: 5397 - DNA, 20 bp, Artificial Sequence
  Synthetic polynucleotide
atttcttgccaaggcctgcc

SEQ ID NO: 5398 - DNA, 20 bp, Artificial Sequence
  Synthetic polynucleotide
cgccccgctccgccccgccc

SEQ ID NO: 5399 - DNA, 20 bp, Artificial Sequence
  Synthetic polynucleotide
gctcctgaacgtggaaggaa

SEQ ID NO: 5400 - DNA, 20 bp, Artificial Sequence
  Synthetic polynucleotide
cccggtcttgggacggacgc

SEQ ID NO: 5401 - DNA, 20 bp, Artificial Sequence
  Synthetic polynucleotide
ccttacccaggaggaggcag

SEQ ID NO: 5402 - DNA, 20 bp, Artificial Sequence
  Synthetic polynucleotide
cggccccggggcgacggccc

SEQ ID NO: 5403 - DNA, 20 bp, Artificial Sequence
  Synthetic polynucleotide
gatgagagccgtacgcaggc

SEQ ID NO: 5404 - DNA, 20 bp, Artificial Sequence
  Synthetic polynucleotide
cagcaggggaggcccccagc

SEQ ID NO: 5405 - DNA, 20 bp, Artificial Sequence
  Synthetic polynucleotide
aagaggcgctaccaggcagg

SEQ ID NO: 5406 - DNA, 20 bp, Artificial Sequence
  Synthetic polynucleotide
tgactctccgtccaaggagg

SEQ ID NO: 5407 - DNA, 20 bp, Artificial Sequence
  Synthetic polynucleotide
gaggctgtgcgggaaatgtg

SEQ ID NO: 5408 - DNA, 20 bp, Artificial Sequence
  Synthetic polynucleotide
atctcatcgtttgcgccgcc

SEQ ID NO: 5409 - DNA, 20 bp, Artificial Sequence
  Synthetic polynucleotide
tgcacagagtagaagagaag

SEQ ID NO: 5410 - DNA, 20 bp, Artificial Sequence
  Synthetic polynucleotide
gactgcaaggacagactgca

SEQ ID NO: 5411 - DNA, 20 bp, Artificial Sequence
  Synthetic polynucleotide
cctgttctgaaggcaggtga

SEQ ID NO: 5412 - DNA, 20 bp, Artificial Sequence
  Synthetic polynucleotide
ggtgctcacggccatggcca

SEQ ID NO: 5413 - DNA, 20 bp, Artificial Sequence
  Synthetic polynucleotide
tcccccagaaaaaggtgcaa

SEQ ID NO: 5414 - DNA, 20 bp, Artificial Sequence
  Synthetic polynucleotide
cgggatgaagaaggcgaaga

SEQ ID NO: 5415 - DNA, 20 bp, Artificial Sequence
  Synthetic polynucleotide
ggacagactctggatgactc

SEQ ID NO: 5416 - DNA, 20 bp, Artificial Sequence
  Synthetic polynucleotide
tatttgttcttacaggcaac

SEQ ID NO: 5417 - DNA, 20 bp, Artificial Sequence
  Synthetic polynucleotide
tcttgtgctgcatacggagc

SEQ ID NO: 5418 - DNA, 20 bp, Artificial Sequence
  Synthetic polynucleotide
atcatggtgacacttactta

SEQ ID NO: 5419 - DNA, 20 bp, Artificial Sequence
  Synthetic polynucleotide
agccgcagggcggggggggc

SEQ ID NO: 5420 - DNA, 20 bp, Artificial Sequence
  Synthetic polynucleotide
cagggatggattatatatat

SEQ ID NO: 5421 - DNA, 20 bp, Artificial Sequence
  Synthetic polynucleotide
cgcgaggctgggccgtcgcg

SEQ ID NO: 5422 - DNA, 20 bp, Artificial Sequence
  Synthetic polynucleotide
ggcaggccagaagcagcagc

SEQ ID NO: 5423 - DNA, 20 bp, Artificial Sequence
  Synthetic polynucleotide
ccttttttaaggccttttta

SEQ ID NO: 5424 - DNA, 20 bp, Artificial Sequence
  Synthetic polynucleotide
gctgctgctgctgctgctgc

SEQ ID NO: 5425 - DNA, 20 bp, Artificial Sequence
  Synthetic polynucleotide
ctcatgataaggatgatata

SEQ ID NO: 5426 - DNA, 20 bp, Artificial Sequence
  Synthetic polynucleotide
atctgacgacaaatctgacg

SEQ ID NO: 5427 - DNA, 20 bp, Artificial Sequence
  Synthetic polynucleotide
ccaagctggcactggtgagc

SEQ ID NO: 5428 - DNA, 20 bp, Artificial Sequence
  Synthetic polynucleotide
ttgtccttgtggatgggggg

SEQ ID NO: 5429 - DNA, 20 bp, Artificial Sequence
  Synthetic polynucleotide
ctcccaggcagcggtagtag

SEQ ID NO: 5430 - DNA, 20 bp, Artificial Sequence
  Synthetic polynucleotide
tgtggacctgaagccttcct

SEQ ID NO: 5431 - DNA, 20 bp, Artificial Sequence
  Synthetic polynucleotide
gagctggggtccaggattcc

SEQ ID NO: 5432 - DNA, 20 bp, Artificial Sequence
  Synthetic polynucleotide
atgtgatagaaaagctgggc

SEQ ID NO: 5433 - DNA, 20 bp, Artificial Sequence
  Synthetic polynucleotide
tgaaggcatccttgctctga

SEQ ID NO: 5434 - DNA, 20 bp, Artificial Sequence
  Synthetic polynucleotide
ccgggtgggcggcccgcccg

SEQ ID NO: 5435 - DNA, 20 bp, Artificial Sequence
  Synthetic polynucleotide
atggctgtggagtcctgcct

SEQ ID NO: 5436 - DNA, 20 bp, Artificial Sequence
  Synthetic polynucleotide
cgtgctggcgctcttcgtgc

SEQ ID NO: 5437 - DNA, 20 bp, Artificial Sequence
  Synthetic polynucleotide
ctgggtgtggctcccctggc

SEQ ID NO: 5438 - DNA, 20 bp, Artificial Sequence
  Synthetic polynucleotide
cccgggctcccccggcagta

SEQ ID NO: 5439 - DNA, 20 bp, Artificial Sequence
  Synthetic polynucleotide
aactgaaaagagtgccagcc

SEQ ID NO: 5440 - DNA, 20 bp, Artificial Sequence
  Synthetic polynucleotide
tacggggccaaccaggtagg

SEQ ID NO: 5441 - DNA, 20 bp, Artificial Sequence
  Synthetic polynucleotide
ttctcctccgaggcggcctg

SEQ ID NO: 5442 - DNA, 20 bp, Artificial Sequence
  Synthetic polynucleotide
ggtcgccccctgggctctcc

SEQ ID NO: 5443 - DNA, 20 bp, Artificial Sequence
  Synthetic polynucleotide
cccctggagaccagcatcat

SEQ ID NO: 5444 - DNA, 20 bp, Artificial Sequence
  Synthetic polynucleotide
cagagttccacacggcatca

SEQ ID NO: 5445 - DNA, 20 bp, Artificial Sequence
  Synthetic polynucleotide
ctgcgaaacatctcagcaca

SEQ ID NO: 5446 - DNA, 20 bp, Artificial Sequence
  Synthetic polynucleotide
ctgctcgggccgcgggccgc

SEQ ID NO: 5447 - DNA, 20 bp, Artificial Sequence
  Synthetic polynucleotide
gttggagacagggacaccgt

SEQ ID NO: 5448 - DNA, 20 bp, Artificial Sequence
  Synthetic polynucleotide
agccatagctggggcagggc

SEQ ID NO: 5449 - DNA, 20 bp, Artificial Sequence
  Synthetic polynucleotide
gcttctgtgctcctggctcc

SEQ ID NO: 5450 - DNA, 20 bp, Artificial Sequence
  Synthetic polynucleotide
acacctggaaaggtcaggtc

SEQ ID NO: 5451 - DNA, 20 bp, Artificial Sequence
  Synthetic polynucleotide
gtggagtggagcactcactt

SEQ ID NO: 5452 - DNA, 20 bp, Artificial Sequence
  Synthetic polynucleotide
gcccaaggtggccaagccca

SEQ ID NO: 5453 - DNA, 20 bp, Artificial Sequence
  Synthetic polynucleotide
ccgcggggccccggggcccc

SEQ ID NO: 5454 - DNA, 20 bp, Artificial Sequence
  Synthetic polynucleotide
aatgccatgggcaagtacgt

SEQ ID NO: 5455 - DNA, 20 bp, Artificial Sequence
  Synthetic polynucleotide
cccgatgctgttggcgtaga

SEQ ID NO: 5456 - DNA, 20 bp, Artificial Sequence
  Synthetic polynucleotide
ccttggtcagcggaggcggg

SEQ ID NO: 5457 - DNA, 20 bp, Artificial Sequence
  Synthetic polynucleotide
aggaggactcactggttcac

SEQ ID NO: 5458 - DNA, 20 bp, Artificial Sequence
  Synthetic polynucleotide
tattgatggacatttattga

SEQ ID NO: 5459 - DNA, 20 bp, Artificial Sequence
  Synthetic polynucleotide
cattgggacaaagtatccat

SEQ ID NO: 5460 - DNA, 20 bp, Artificial Sequence
  Synthetic polynucleotide
gaggcctcgtatgttatgtg

SEQ ID NO: 5461 - DNA, 20 bp, Artificial Sequence
  Synthetic polynucleotide
tgtctgcggccgccgtgccg

SEQ ID NO: 5462 - DNA, 20 bp, Artificial Sequence
  Synthetic polynucleotide
cgctgcgcacgtccggtccg

SEQ ID NO: 5463 - DNA, 20 bp, Artificial Sequence
  Synthetic polynucleotide
cacatgagcataactaactc

SEQ ID NO: 5464 - DNA, 20 bp, Artificial Sequence
  Synthetic polynucleotide
attatttcaattggttggta

SEQ ID NO: 5465 - DNA, 20 bp, Artificial Sequence
  Synthetic polynucleotide
gggaacgtcagttaggagtt

SEQ ID NO: 5466 - DNA, 20 bp, Artificial Sequence
  Synthetic polynucleotide
tttcaattcaatacaatacc

SEQ ID NO: 5467 - DNA, 20 bp, Artificial Sequence
  Synthetic polynucleotide
gcagccacagtgtgctgctc

SEQ ID NO: 5468 - DNA, 20 bp, Artificial Sequence
  Synthetic polynucleotide
gtgagcataacactacatac

SEQ ID NO: 5469 - DNA, 20 bp, Artificial Sequence
  Synthetic polynucleotide
ggcgggggtgcggccggggc

SEQ ID NO: 5470 - DNA, 20 bp, Artificial Sequence
  Synthetic polynucleotide
tcaggaggagacgtctcagg

SEQ ID NO: 5471 - DNA, 20 bp, Artificial Sequence
  Synthetic polynucleotide
ctggtggaatggggccctgg

SEQ ID NO: 5472 - DNA, 20 bp, Artificial Sequence
  Synthetic polynucleotide
accgtgcatttctgcatttc

SEQ ID NO: 5473 - DNA, 20 bp, Artificial Sequence
  Synthetic polynucleotide
cgaagctcaaggtggagaca

SEQ ID NO: 5474 - DNA, 20 bp, Artificial Sequence
  Synthetic polynucleotide
tcggcataagtggaccgacc

SEQ ID NO: 5475 - DNA, 20 bp, Artificial Sequence
  Synthetic polynucleotide
ctccagcccgggtcggcggg

SEQ ID NO: 5476 - DNA, 20 bp, Artificial Sequence
  Synthetic polynucleotide
cgcggagcctcgcaggggca

SEQ ID NO: 5477 - DNA, 20 bp, Artificial Sequence
  Synthetic polynucleotide
agagaagtctcgagaccacc

SEQ ID NO: 5478 - DNA, 20 bp, Artificial Sequence
  Synthetic polynucleotide
gcctgggcgcggaggagcgg

SEQ ID NO: 5479 - DNA, 20 bp, Artificial Sequence
  Synthetic polynucleotide
ggcaccaagcggtacgtaca

SEQ ID NO: 5480 - DNA, 20 bp, Artificial Sequence
  Synthetic polynucleotide
catccccgtcgtgctcgctg

SEQ ID NO: 5481 - DNA, 20 bp, Artificial Sequence
  Synthetic polynucleotide
cgggctcggactacggacta

SEQ ID NO: 5482 - DNA, 20 bp, Artificial Sequence
  Synthetic polynucleotide
ggggaggtgtcggccggcct

SEQ ID NO: 5483 - DNA, 20 bp, Artificial Sequence
  Synthetic polynucleotide
gtggaatgaggccgaggccg

SEQ ID NO: 5484 - DNA, 20 bp, Artificial Sequence
  Synthetic polynucleotide
gcggcggcggcggcagcagg

SEQ ID NO: 5485 - DNA, 20 bp, Artificial Sequence
  Synthetic polynucleotide
ccgcatcagcaggggcctgc

SEQ ID NO: 5486 - DNA, 20 bp, Artificial Sequence
  Synthetic polynucleotide
gcatctacaactggggcaac

SEQ ID NO: 5487 - DNA, 20 bp, Artificial Sequence
  Synthetic polynucleotide
ccaatcagtggatcaagttt

SEQ ID NO: 5488 - DNA, 20 bp, Artificial Sequence
  Synthetic polynucleotide
ggccacttgtgccttgtgcc

SEQ ID NO: 5489 - DNA, 20 bp, Artificial Sequence
  Synthetic polynucleotide
agcggcggcaggtggaggag

SEQ ID NO: 5490 - DNA, 20 bp, Artificial Sequence
  Synthetic polynucleotide
agccgcggcagcaccagccg

SEQ ID NO: 5491 - DNA, 20 bp, Artificial Sequence
  Synthetic polynucleotide
gcgaggagcaaggcgacgga

SEQ ID NO: 5492 - DNA, 20 bp, Artificial Sequence
  Synthetic polynucleotide
aggacacagggtagagagcc

SEQ ID NO: 5493 - DNA, 20 bp, Artificial Sequence
  Synthetic polynucleotide
acgaaggcctgtgggtgctg

SEQ ID NO: 5494 - DNA, 20 bp, Artificial Sequence
  Synthetic polynucleotide
caccgcctgctgctgctgct

SEQ ID NO: 5495 - DNA, 20 bp, Artificial Sequence
  Synthetic polynucleotide
cggggcggtttggggcggtt

SEQ ID NO: 5496 - DNA, 20 bp, Artificial Sequence
  Synthetic polynucleotide
cagctccaggtacgtctgtc

SEQ ID NO: 5497 - DNA, 20 bp, Artificial Sequence
  Synthetic polynucleotide
acttttgaggacgctgacgc

SEQ ID NO: 5498 - DNA, 20 bp, Artificial Sequence
  Synthetic polynucleotide
gtagatcggctgctgcagat

SEQ ID NO: 5499 - DNA, 20 bp, Artificial Sequence
  Synthetic polynucleotide
gcccgcagctctgggctggc

SEQ ID NO: 5500 - DNA, 20 bp, Artificial Sequence
  Synthetic polynucleotide
ccagctactggcccagctac

SEQ ID NO: 5501 - DNA, 20 bp, Artificial Sequence
  Synthetic polynucleotide
gggcggggctgggctgggct

SEQ ID NO: 5502 - DNA, 20 bp, Artificial Sequence
  Synthetic polynucleotide
cattgagcaggtcctgcaag

SEQ ID NO: 5503 - DNA, 20 bp, Artificial Sequence
  Synthetic polynucleotide
gccactgcccgggaggcatg

SEQ ID NO: 5504 - DNA, 20 bp, Artificial Sequence
  Synthetic polynucleotide
ggcgggtcgggggcgggcgg

SEQ ID NO: 5505 - DNA, 20 bp, Artificial Sequence
  Synthetic polynucleotide
gcggggagagatgactgact

SEQ ID NO: 5506 - DNA, 20 bp, Artificial Sequence
  Synthetic polynucleotide
aagggaactcctctcctcta

SEQ ID NO: 5507 - DNA, 20 bp, Artificial Sequence
  Synthetic polynucleotide
ggtggctcctggggccgggc

SEQ ID NO: 5508 - DNA, 20 bp, Artificial Sequence
  Synthetic polynucleotide
agttggtccttctcggtcct

SEQ ID NO: 5509 - DNA, 20 bp, Artificial Sequence
  Synthetic polynucleotide
gcgagcgcaggcggcgcagg

SEQ ID NO: 5510 - DNA, 20 bp, Artificial Sequence
  Synthetic polynucleotide
cgggggccgcggcgcggggg

SEQ ID NO: 5511 - DNA, 20 bp, Artificial Sequence
  Synthetic polynucleotide
agtgaagatgacaatcatgt

SEQ ID NO: 5512 - DNA, 20 bp, Artificial Sequence
  Synthetic polynucleotide
agaagtggcactgcctgccc

SEQ ID NO: 5513 - DNA, 20 bp, Artificial Sequence
  Synthetic polynucleotide
tgacccggtagtagggtagt

SEQ ID NO: 5514 - DNA, 20 bp, Artificial Sequence
  Synthetic polynucleotide
cttgagcactgtgagcactg

SEQ ID NO: 5515 - DNA, 20 bp, Artificial Sequence
  Synthetic polynucleotide
atgtttagggtgactgactg

SEQ ID NO: 5516 - DNA, 20 bp, Artificial Sequence
  Synthetic polynucleotide
tcggctgcagcagcagcagc

SEQ ID NO: 5517 - DNA, 20 bp, Artificial Sequence
  Synthetic polynucleotide
gcgcggcgcacgggtccgcg

SEQ ID NO: 5518 - DNA, 20 bp, Artificial Sequence
  Synthetic polynucleotide
ctgagcagcagcagcagcag

SEQ ID NO: 5519 - DNA, 20 bp, Artificial Sequence
  Synthetic polynucleotide
tcagatacagccaggctgat

SEQ ID NO: 5520 - DNA, 20 bp, Artificial Sequence
  Synthetic polynucleotide
ggcaaggaggtggggttgtg

SEQ ID NO: 5521 - DNA, 20 bp, Artificial Sequence
  Synthetic polynucleotide
catatcagtctgtgggactg

SEQ ID NO: 5522 - DNA, 20 bp, Artificial Sequence
  Synthetic polynucleotide
gctggtgctgttggccctgc

SEQ ID NO: 5523 - DNA, 20 bp, Artificial Sequence
  Synthetic polynucleotide
gggcagagacaggtaggtac

SEQ ID NO: 5524 - DNA, 20 bp, Artificial Sequence
  Synthetic polynucleotide
tgttacaagcagctgggcct

SEQ ID NO: 5525 - DNA, 20 bp, Artificial Sequence
  Synthetic polynucleotide
gacaaatctgacatctgacg

SEQ ID NO: 5526 - DNA, 20 bp, Artificial Sequence
  Synthetic polynucleotide
agaaagcaagagtggtggtg

SEQ ID NO: 5527 - DNA, 20 bp, Artificial Sequence
  Synthetic polynucleotide
ggccgtaggcggcgggcggc

SEQ ID NO: 5528 - DNA, 20 bp, Artificial Sequence
  Synthetic polynucleotide
tccagggctggggcagggct

SEQ ID NO: 5529 - DNA, 20 bp, Artificial Sequence
  Synthetic polynucleotide
gtgctgaagatgaaagaaag

SEQ ID NO: 5530 - DNA, 20 bp, Artificial Sequence
  Synthetic polynucleotide
gcccgggaggcgaacccccc

SEQ ID NO: 5531 - DNA, 20 bp, Artificial Sequence
  Synthetic polynucleotide
cgggctgcccggctcgtccc

SEQ ID NO: 5532 - DNA, 20 bp, Artificial Sequence
  Synthetic polynucleotide
tgcggcggcggccgcggctg

SEQ ID NO: 5533 - DNA, 20 bp, Artificial Sequence
  Synthetic polynucleotide
caaggacaaatctgactgca

SEQ ID NO: 5534 - DNA, 20 bp, Artificial Sequence
  Synthetic polynucleotide
ccggggcactgcagctaccg

SEQ ID NO: 5535 - DNA, 20 bp, Artificial Sequence
  Synthetic polynucleotide
actcacgtccatgtagtagt

SEQ ID NO: 5536 - DNA, 20 bp, Artificial Sequence
  Synthetic polynucleotide
gatgtgctctggcgagtaga

SEQ ID NO: 5537 - DNA, 20 bp, Artificial Sequence
  Synthetic polynucleotide
tgccaaggagaaaggtgagg

SEQ ID NO: 5538 - DNA, 20 bp, Artificial Sequence
  Synthetic polynucleotide
cctattattgggaatgggaa

SEQ ID NO: 5539 - DNA, 20 bp, Artificial Sequence
  Synthetic polynucleotide
agggaggcgcgcacgctcgg

SEQ ID NO: 5540 - DNA, 20 bp, Artificial Sequence
  Synthetic polynucleotide
taggcagcctgcactggtgg

SEQ ID NO: 5541 - DNA, 20 bp, Artificial Sequence
  Synthetic polynucleotide
gcagcttctggtctgtctgt

SEQ ID NO: 5542 - DNA, 20 bp, Artificial Sequence
  Synthetic polynucleotide
gcacggcagcgggccctcag

SEQ ID NO: 5543 - DNA, 20 bp, Artificial Sequence
  Synthetic polynucleotide
aatgcttggacgaaaatgct

SEQ ID NO: 5544 - DNA, 20 bp, Artificial Sequence
  Synthetic polynucleotide
gtcgccgatgaagagaagaa

SEQ ID NO: 5545 - DNA, 20 bp, Artificial Sequence
  Synthetic polynucleotide
gctctccacgtcgcccgccc

SEQ ID NO: 5546 - DNA, 20 bp, Artificial Sequence
  Synthetic polynucleotide
gctgcagacggagctgcaga

SEQ ID NO: 5547 - DNA, 20 bp, Artificial Sequence
  Synthetic polynucleotide
gagccaaaaaggccatgcat

SEQ ID NO: 5548 - DNA, 20 bp, Artificial Sequence
  Synthetic polynucleotide
cgggccgtgtgccgccccgc

SEQ ID NO: 5549 - DNA, 20 bp, Artificial Sequence
  Synthetic polynucleotide
ggggcccccacactacgctg

SEQ ID NO: 5550 - DNA, 20 bp, Artificial Sequence
  Synthetic polynucleotide
cagctggcagctgctgctgc

SEQ ID NO: 5551 - DNA, 20 bp, Artificial Sequence
  Synthetic polynucleotide
actgcaaggacaaatctgac

SEQ ID NO: 5552 - DNA, 20 bp, Artificial Sequence
  Synthetic polynucleotide
agtctcaggaactttgaatc

SEQ ID NO: 5553 - DNA, 20 bp, Artificial Sequence
  Synthetic polynucleotide
caggccagtgacaatgagtc

SEQ ID NO: 5554 - DNA, 20 bp, Artificial Sequence
  Synthetic polynucleotide
gggttccttctgaatgatga

SEQ ID NO: 5555 - DNA, 20 bp, Artificial Sequence
  Synthetic polynucleotide
gattcactttcttcctgcct

SEQ ID NO: 5556 - DNA, 20 bp, Artificial Sequence
  Synthetic polynucleotide
gccgcgggagcgagggagcg

SEQ ID NO: 5557 - DNA, 20 bp, Artificial Sequence
  Synthetic polynucleotide
atgagctcactgttctgttc

SEQ ID NO: 5558 - DNA, 20 bp, Artificial Sequence
  Synthetic polynucleotide
tcaggggtctctcttttttt

SEQ ID NO: 5559 - DNA, 20 bp, Artificial Sequence
  Synthetic polynucleotide
gtgggccacagaggccgcag

SEQ ID NO: 5560 - DNA, 20 bp, Artificial Sequence
  Synthetic polynucleotide
ttcaccgtcaccgtccgtcc

SEQ ID NO: 5561 - DNA, 20 bp, Artificial Sequence
  Synthetic polynucleotide
atgaacatgggtatgaacat

SEQ ID NO: 5562 - DNA, 20 bp, Artificial Sequence
  Synthetic polynucleotide
ggtcaaaacgaatatgaata

SEQ ID NO: 5563 - DNA, 20 bp, Artificial Sequence
  Synthetic polynucleotide
cgtggaggaggtggatgagg

SEQ ID NO: 5564 - DNA, 20 bp, Artificial Sequence
  Synthetic polynucleotide
gctggtgctgttggtcctgc

SEQ ID NO: 5565 - DNA, 20 bp, Artificial Sequence
  Synthetic polynucleotide
accaacctggagcgtgagtg

SEQ ID NO: 5566 - DNA, 20 bp, Artificial Sequence
  Synthetic polynucleotide
gagtgcaggactaaagggta

SEQ ID NO: 5567 - DNA, 20 bp, Artificial Sequence
  Synthetic polynucleotide
agcggaggggacaggcaggc

SEQ ID NO: 5568 - DNA, 20 bp, Artificial Sequence
  Synthetic polynucleotide
tacgcttggtatgttatcct

SEQ ID NO: 5569 - DNA, 20 bp, Artificial Sequence
  Synthetic polynucleotide
cagctgcctgactcggtcct

SEQ ID NO: 5570 - DNA, 20 bp, Artificial Sequence
  Synthetic polynucleotide
attgttgtcaatgacggagg

SEQ ID NO: 5571 - DNA, 20 bp, Artificial Sequence
  Synthetic polynucleotide
cgagaggccgaggcggccgg

SEQ ID NO: 5572 - DNA, 20 bp, Artificial Sequence
  Synthetic polynucleotide
atgggggaacgccggagaat

SEQ ID NO: 5573 - DNA, 20 bp, Artificial Sequence
  Synthetic polynucleotide
ccgggccgcggcagcggcag

SEQ ID NO: 5574 - DNA, 20 bp, Artificial Sequence
  Synthetic polynucleotide
caccacatccacagacagac

SEQ ID NO: 5575 - DNA, 20 bp, Artificial Sequence
  Synthetic polynucleotide
ggaggatgaggcgatggcga

SEQ ID NO: 5576 - DNA, 20 bp, Artificial Sequence
  Synthetic polynucleotide
gcagtgtcagcgaggaagcg

SEQ ID NO: 5577 - DNA, 20 bp, Artificial Sequence
  Synthetic polynucleotide
agctgcgagagctgcggctg

SEQ ID NO: 5578 - DNA, 20 bp, Artificial Sequence
  Synthetic polynucleotide
tcttaccaacatctggtcaa

SEQ ID NO: 5579 - DNA, 20 bp, Artificial Sequence
  Synthetic polynucleotide
cgttgcccaggagctagctg

SEQ ID NO: 5580 - DNA, 20 bp, Artificial Sequence
  Synthetic polynucleotide
agcgctcgtggcagcggcgg

SEQ ID NO: 5581 - DNA, 20 bp, Artificial Sequence
  Synthetic polynucleotide
ttcaccaaaggatgactgac

SEQ ID NO: 5582 - DNA, 20 bp, Artificial Sequence
  Synthetic polynucleotide
tcaacaaatcactagaggag

SEQ ID NO: 5583 - DNA, 20 bp, Artificial Sequence
  Synthetic polynucleotide
tcgtaatcgctggtaatcgc

SEQ ID NO: 5584 - DNA, 20 bp, Artificial Sequence
  Synthetic polynucleotide
agggagctcaccagacagac

SEQ ID NO: 5585 - DNA, 20 bp, Artificial Sequence
  Synthetic polynucleotide
gttcgctgaaggggaaggga

SEQ ID NO: 5586 - DNA, 20 bp, Artificial Sequence
  Synthetic polynucleotide
ggtagctgtggatgcggcgg

SEQ ID NO: 5587 - DNA, 20 bp, Artificial Sequence
  Synthetic polynucleotide
ggttcgcctcccgggccccc

SEQ ID NO: 5588 - DNA, 20 bp, Artificial Sequence
  Synthetic polynucleotide
ggccatgtacagcgagcagc

SEQ ID NO: 5589 - DNA, 20 bp, Artificial Sequence
  Synthetic polynucleotide
taaaagcacagtaggacagt

SEQ ID NO: 5590 - DNA, 20 bp, Artificial Sequence
  Synthetic polynucleotide
ctcggcctctcggctcacta

SEQ ID NO: 5591 - DNA, 20 bp, Artificial Sequence
  Synthetic polynucleotide
gcggcgcgggcctcccgcgc

SEQ ID NO: 5592 - DNA, 20 bp, Artificial Sequence
  Synthetic polynucleotide
caggtactcacagatggcgg

SEQ ID NO: 5593 - DNA, 20 bp, Artificial Sequence
  Synthetic polynucleotide
gggcgagcagcgcgcagagc

SEQ ID NO: 5594 - DNA, 20 bp, Artificial Sequence
  Synthetic polynucleotide
ccgccggcccgcgggcccgc

SEQ ID NO: 5595 - DNA, 20 bp, Artificial Sequence
  Synthetic polynucleotide
ggagatctcggaggcatcgg

SEQ ID NO: 5596 - DNA, 20 bp, Artificial Sequence
  Synthetic polynucleotide
gttatggatgccgaagatga

SEQ ID NO: 5597 - DNA, 20 bp, Artificial Sequence
  Synthetic polynucleotide
caaatctgacgagtctgacg

SEQ ID NO: 5598 - DNA, 20 bp, Artificial Sequence
  Synthetic polynucleotide
cccaggagtgaactggtgtc

SEQ ID NO: 5599 - DNA, 20 bp, Artificial Sequence
  Synthetic polynucleotide
agtcatcttcactaatgtaa

SEQ ID NO: 5600 - DNA, 20 bp, Artificial Sequence
  Synthetic polynucleotide
ataggtgttattggaggtgg

SEQ ID NO: 5601 - DNA, 20 bp, Artificial Sequence
  Synthetic polynucleotide
aacccactcacacttcacac

SEQ ID NO: 5602 - DNA, 20 bp, Artificial Sequence
  Synthetic polynucleotide
aagggacatagaaaatcaaa

SEQ ID NO: 5603 - DNA, 20 bp, Artificial Sequence
  Synthetic polynucleotide
ccaggtgccattttggggcc

SEQ ID NO: 5604 - DNA, 20 bp, Artificial Sequence
  Synthetic polynucleotide
aacttattcagaacttattc

SEQ ID NO: 5605 - DNA, 20 bp, Artificial Sequence
  Synthetic polynucleotide
tataactttttggcacaggc

SEQ ID NO: 5606 - DNA, 20 bp, Artificial Sequence
  Synthetic polynucleotide
cggaggccggggggccgcgg

SEQ ID NO: 5607 - DNA, 20 bp, Artificial Sequence
  Synthetic polynucleotide
ccggctgcgctgcgctgcgc

SEQ ID NO: 5608 - DNA, 20 bp, Artificial Sequence
  Synthetic polynucleotide
ggtctttctgcacatttggg

SEQ ID NO: 5609 - DNA, 20 bp, Artificial Sequence
  Synthetic polynucleotide
tgaacttctcctccatcatc

SEQ ID NO: 5610 - DNA, 20 bp, Artificial Sequence
  Synthetic polynucleotide
atccccgcttgtgaacactg

SEQ ID NO: 5611 - DNA, 20 bp, Artificial Sequence
  Synthetic polynucleotide
cctgcgcacgctgcgcacgc

SEQ ID NO: 5612 - DNA, 20 bp, Artificial Sequence
  Synthetic polynucleotide
tgtgaggagtgtgaggagtg

SEQ ID NO: 5613 - DNA, 20 bp, Artificial Sequence
  Synthetic polynucleotide
gacacaagggcctgaagcaa

SEQ ID NO: 5614 - DNA, 20 bp, Artificial Sequence
  Synthetic polynucleotide
ccataacagcatcaggagtc

SEQ ID NO: 5615 - DNA, 20 bp, Artificial Sequence
  Synthetic polynucleotide
gagacaaaccccaggatgct

SEQ ID NO: 5616 - DNA, 20 bp, Artificial Sequence
  Synthetic polynucleotide
gcatctacattgacgacgac

SEQ ID NO: 5617 - DNA, 20 bp, Artificial Sequence
  Synthetic polynucleotide
gacgggtgtctccacagtga

SEQ ID NO: 5618 - DNA, 20 bp, Artificial Sequence
  Synthetic polynucleotide
agcatgcataatgaatgggt

SEQ ID NO: 5619 - DNA, 20 bp, Artificial Sequence
  Synthetic polynucleotide
ggagactcgggagctggagc

SEQ ID NO: 5620 - DNA, 20 bp, Artificial Sequence
  Synthetic polynucleotide
atcgacggcatcggcggcat

SEQ ID NO: 5621 - DNA, 20 bp, Artificial Sequence
  Synthetic polynucleotide
ctccagcagcttgcggtggt

SEQ ID NO: 5622 - DNA, 20 bp, Artificial Sequence
  Synthetic polynucleotide
cccgaagcagggtgtagtgt

SEQ ID NO: 5623 - DNA, 20 bp, Artificial Sequence
  Synthetic polynucleotide
ctaagcaacatgagcttagc

SEQ ID NO: 5624 - DNA, 20 bp, Artificial Sequence
  Synthetic polynucleotide
gcctcggcctctcggcctct

SEQ ID NO: 5625 - DNA, 20 bp, Artificial Sequence
  Synthetic polynucleotide
acgcatgtctcgcggtaccg

SEQ ID NO: 5626 - DNA, 20 bp, Artificial Sequence
  Synthetic polynucleotide
ggcctttgctgtggttgggt

SEQ ID NO: 5627 - DNA, 20 bp, Artificial Sequence
  Synthetic polynucleotide
cccatgacctatactcactc

SEQ ID NO: 5628 - DNA, 20 bp, Artificial Sequence
  Synthetic polynucleotide
cagcttgatgaggtcagatg

SEQ ID NO: 5629 - DNA, 20 bp, Artificial Sequence
  Synthetic polynucleotide
gtgcggccagtggaagaccg

SEQ ID NO: 5630 - DNA, 20 bp, Artificial Sequence
  Synthetic polynucleotide
agctgagctgcgaggtgtcg

SEQ ID NO: 5631 - DNA, 20 bp, Artificial Sequence
  Synthetic polynucleotide
gacaggatggtgaacaggga

SEQ ID NO: 5632 - DNA, 20 bp, Artificial Sequence
  Synthetic polynucleotide
aaggagttgatgagggaggg

SEQ ID NO: 5633 - DNA, 20 bp, Artificial Sequence
  Synthetic polynucleotide
acagggctcgtccaactaac

SEQ ID NO: 5634 - DNA, 20 bp, Artificial Sequence
  Synthetic polynucleotide
ttgaaggccatcacgtatga

SEQ ID NO: 5635 - DNA, 20 bp, Artificial Sequence
  Synthetic polynucleotide
tctcaaggttatgcttctca

SEQ ID NO: 5636 - DNA, 20 bp, Artificial Sequence
  Synthetic polynucleotide
tgctggggatgctgctgctg

SEQ ID NO: 5637 - DNA, 20 bp, Artificial Sequence
  Synthetic polynucleotide
ggcggtgcagccgaaggagg

SEQ ID NO: 5638 - DNA, 20 bp, Artificial Sequence
  Synthetic polynucleotide
gaacatcggggctgcggtgc

SEQ ID NO: 5639 - DNA, 20 bp, Artificial Sequence
  Synthetic polynucleotide
gacccagcccggccaggagc

SEQ ID NO: 5640 - DNA, 20 bp, Artificial Sequence
  Synthetic polynucleotide
ggccgtagtacatgacatga

SEQ ID NO: 5641 - DNA, 20 bp, Artificial Sequence
  Synthetic polynucleotide
cgggagccggaggtggacgg

SEQ ID NO: 5642 - DNA, 20 bp, Artificial Sequence
  Synthetic polynucleotide
caaggacgcctaccatgcat

SEQ ID NO: 5643 - DNA, 20 bp, Artificial Sequence
  Synthetic polynucleotide
ttacagcaccgatgacccag

SEQ ID NO: 5644 - DNA, 20 bp, Artificial Sequence
  Synthetic polynucleotide
gcggaaatgcttgatttcag

SEQ ID NO: 5645 - DNA, 20 bp, Artificial Sequence
  Synthetic polynucleotide
tgactaatctggatcctatc

SEQ ID NO: 5646 - DNA, 20 bp, Artificial Sequence
  Synthetic polynucleotide
acgctcatagagtaactaac

SEQ ID NO: 5647 - DNA, 20 bp, Artificial Sequence
  Synthetic polynucleotide
gtgccggccagccggcccgc

SEQ ID NO: 5648 - DNA, 20 bp, Artificial Sequence
  Synthetic polynucleotide
gcggcgtagggcagcgccag

SEQ ID NO: 5649 - DNA, 20 bp, Artificial Sequence
  Synthetic polynucleotide
caccagtgtgggcttcgtgt

SEQ ID NO: 5650 - DNA, 20 bp, Artificial Sequence
  Synthetic polynucleotide
ggtggtcctgccggaggcgg

SEQ ID NO: 5651 - DNA, 20 bp, Artificial Sequence
  Synthetic polynucleotide
catccgggtggagagcggcg

SEQ ID NO: 5652 - DNA, 20 bp, Artificial Sequence
  Synthetic polynucleotide
aggatgagatgctgcggcgg

SEQ ID NO: 5653 - DNA, 20 bp, Artificial Sequence
  Synthetic polynucleotide
tttgatgaggaggaaggatg

SEQ ID NO: 5654 - DNA, 20 bp, Artificial Sequence
  Synthetic polynucleotide
agatgcaaatgggtgggggg

SEQ ID NO: 5655 - DNA, 20 bp, Artificial Sequence
  Synthetic polynucleotide
gcccttgttgaggtgttgtt

SEQ ID NO: 5656 - DNA, 20 bp, Artificial Sequence
  Synthetic polynucleotide
atcattatgctgaggatttg

SEQ ID NO: 5657 - DNA, 20 bp, Artificial Sequence
  Synthetic polynucleotide
tgaccaaaagcaggaagagc

SEQ ID NO: 5658 - DNA, 20 bp, Artificial Sequence
  Synthetic polynucleotide
aaaggggcggacgctgaggg

SEQ ID NO: 5659 - DNA, 20 bp, Artificial Sequence
  Synthetic polynucleotide
aggccccttgcaatgtgggt

SEQ ID NO: 5660 - DNA, 20 bp, Artificial Sequence
  Synthetic polynucleotide
ccaccgcacttggctgttgt

SEQ ID NO: 5661 - DNA, 20 bp, Artificial Sequence
  Synthetic polynucleotide
acagggtggagggtggaggg

SEQ ID NO: 5662 - DNA, 20 bp, Artificial Sequence
  Synthetic polynucleotide
ggcattttatagctgcttgc

SEQ ID NO: 5663 - DNA, 20 bp, Artificial Sequence
  Synthetic polynucleotide
ggcggtggcggtgccggtgc

SEQ ID NO: 5664 - DNA, 20 bp, Artificial Sequence
  Synthetic polynucleotide
cgtggaaactgtccacaaca

SEQ ID NO: 5665 - DNA, 20 bp, Artificial Sequence
  Synthetic polynucleotide
atcatggaaccagcagcaca

SEQ ID NO: 5666 - DNA, 20 bp, Artificial Sequence
  Synthetic polynucleotide
gcatggttcactctgaacgg

SEQ ID NO: 5667 - DNA, 20 bp, Artificial Sequence
  Synthetic polynucleotide
gctgctgcgcggcggctgcg

SEQ ID NO: 5668 - DNA, 20 bp, Artificial Sequence
  Synthetic polynucleotide
cgctgtccgaggagcgtccg

SEQ ID NO: 5669 - DNA, 20 bp, Artificial Sequence
  Synthetic polynucleotide
cgagtccgactccggtactc

SEQ ID NO: 5670 - DNA, 20 bp, Artificial Sequence
  Synthetic polynucleotide
gactttggaacagaattttc

SEQ ID NO: 5671 - DNA, 20 bp, Artificial Sequence
  Synthetic polynucleotide
caacagcatgattgacagac

SEQ ID NO: 5672 - DNA, 20 bp, Artificial Sequence
  Synthetic polynucleotide
aggcgggcgaggagcggccg

SEQ ID NO: 5673 - DNA, 20 bp, Artificial Sequence
  Synthetic polynucleotide
caagacattcacgtggttcg

SEQ ID NO: 5674 - DNA, 20 bp, Artificial Sequence
  Synthetic polynucleotide
tatgacccaggaagccgagc

SEQ ID NO: 5675 - DNA, 20 bp, Artificial Sequence
  Synthetic polynucleotide
atgaagatgcccaccaccca

SEQ ID NO: 5676 - DNA, 20 bp, Artificial Sequence
  Synthetic polynucleotide
ttcttggaatggccttggaa

SEQ ID NO: 5677 - DNA, 20 bp, Artificial Sequence
  Synthetic polynucleotide
agccgtgctcgtggtgctcg

SEQ ID NO: 5678 - DNA, 20 bp, Artificial Sequence
  Synthetic polynucleotide
tcaaaagacaaggttactta

SEQ ID NO: 5679 - DNA, 20 bp, Artificial Sequence
  Synthetic polynucleotide
atggtgctgctgccccgaaa

SEQ ID NO: 5680 - DNA, 20 bp, Artificial Sequence
  Synthetic polynucleotide
agttttgggattaaagtttt

SEQ ID NO: 5681 - DNA, 20 bp, Artificial Sequence
  Synthetic polynucleotide
aaactgttcttagtgttctt

SEQ ID NO: 5682 - DNA, 20 bp, Artificial Sequence
  Synthetic polynucleotide
cagttgctggcatgagtttt

SEQ ID NO: 5683 - DNA, 20 bp, Artificial Sequence
  Synthetic polynucleotide
tgagggggaagaggagggag

SEQ ID NO: 5684 - DNA, 20 bp, Artificial Sequence
  Synthetic polynucleotide
tcaacgcggcgctcggcgct

SEQ ID NO: 5685 - DNA, 20 bp, Artificial Sequence
  Synthetic polynucleotide
cattatagtcaagggcataa

SEQ ID NO: 5686 - DNA, 20 bp, Artificial Sequence
  Synthetic polynucleotide
taaaagtggaaataggaaat

SEQ ID NO: 5687 - DNA, 20 bp, Artificial Sequence
  Synthetic polynucleotide
gcccatgcaggctgggtggg

SEQ ID NO: 5688 - DNA, 20 bp, Artificial Sequence
  Synthetic polynucleotide
ccgccgggccgggctgggct

SEQ ID NO: 5689 - DNA, 20 bp, Artificial Sequence
  Synthetic polynucleotide
aaaataccaatctattgttg

SEQ ID NO: 5690 - DNA, 20 bp, Artificial Sequence
  Synthetic polynucleotide
gtgctgctgcgtgctgcgtg

SEQ ID NO: 5691 - DNA, 20 bp, Artificial Sequence
  Synthetic polynucleotide
ctgagtgttacaacgaaaaa

SEQ ID NO: 5692 - DNA, 20 bp, Artificial Sequence
  Synthetic polynucleotide
ggcggcggcggcggcagcgg

SEQ ID NO: 5693 - DNA, 20 bp, Artificial Sequence
  Synthetic polynucleotide
actctgcggcaagtcctctg

SEQ ID NO: 5694 - DNA, 20 bp, Artificial Sequence
  Synthetic polynucleotide
gcaggacgcccgcggcgagc

SEQ ID NO: 5695 - DNA, 20 bp, Artificial Sequence
  Synthetic polynucleotide
ggaggcgccgcctgggttgg

SEQ ID NO: 5696 - DNA, 20 bp, Artificial Sequence
  Synthetic polynucleotide
gcgctttatgcggatctatc

SEQ ID NO: 5697 - DNA, 20 bp, Artificial Sequence
  Synthetic polynucleotide
tacttacgaactgctgggtt

SEQ ID NO: 5698 - DNA, 20 bp, Artificial Sequence
  Synthetic polynucleotide
ctcactgtgcatgatgatgt

SEQ ID NO: 5699 - DNA, 20 bp, Artificial Sequence
  Synthetic polynucleotide
cactgtcgatggctgcacga

SEQ ID NO: 5700 - DNA, 20 bp, Artificial Sequence
  Synthetic polynucleotide
gcgggggcggcgggggcggc

SEQ ID NO: 5701 - DNA, 20 bp, Artificial Sequence
  Synthetic polynucleotide
ggttttggtggaggaagtgg

SEQ ID NO: 5702 - DNA, 20 bp, Artificial Sequence
  Synthetic polynucleotide
tttacaaccctttgtttgtt

SEQ ID NO: 5703 - DNA, 20 bp, Artificial Sequence
  Synthetic polynucleotide
cagtgctggcggcgtcctgg

SEQ ID NO: 5704 - DNA, 20 bp, Artificial Sequence
  Synthetic polynucleotide
gaaatcttgaactccactcc

SEQ ID NO: 5705 - DNA, 20 bp, Artificial Sequence
  Synthetic polynucleotide
gcccgcaactacctggaacc

SEQ ID NO: 5706 - DNA, 20 bp, Artificial Sequence
  Synthetic polynucleotide
gagccagatgtgaaggaggg

SEQ ID NO: 5707 - DNA, 20 bp, Artificial Sequence
  Synthetic polynucleotide
tcggatttcattccattcca

SEQ ID NO: 5708 - DNA, 20 bp, Artificial Sequence
  Synthetic polynucleotide
gcctggcgctccatgcggag

SEQ ID NO: 5709 - DNA, 20 bp, Artificial Sequence
  Synthetic polynucleotide
aaggtcagctggtagcgtag

SEQ ID NO: 5710 - DNA, 20 bp, Artificial Sequence
  Synthetic polynucleotide
caccaccgccggagggtcca

SEQ ID NO: 5711 - DNA, 20 bp, Artificial Sequence
  Synthetic polynucleotide
taggcgtttcatcaaacggc

SEQ ID NO: 5712 - DNA, 20 bp, Artificial Sequence
  Synthetic polynucleotide
ggaggaggaggaggaggtgg

SEQ ID NO: 5713 - DNA, 20 bp, Artificial Sequence
  Synthetic polynucleotide
caagaccgggtctcaagacc

SEQ ID NO: 5714 - DNA, 20 bp, Artificial Sequence
  Synthetic polynucleotide
ggcaactgcagcccggacgg

SEQ ID NO: 5715 - DNA, 20 bp, Artificial Sequence
  Synthetic polynucleotide
caggtagacggtggcggtgg

SEQ ID NO: 5716 - DNA, 20 bp, Artificial Sequence
  Synthetic polynucleotide
gaacgatggtggcaatcgaa

SEQ ID NO: 5717 - DNA, 20 bp, Artificial Sequence
  Synthetic polynucleotide
gtcttctccaacttcatcca

SEQ ID NO: 5718 - DNA, 20 bp, Artificial Sequence
  Synthetic polynucleotide
cctggtgctcctggtgctcc

SEQ ID NO: 5719 - DNA, 20 bp, Artificial Sequence
  Synthetic polynucleotide
aggggaacgaggggaacgag

SEQ ID NO: 5720 - DNA, 20 bp, Artificial Sequence
  Synthetic polynucleotide
gaaatgtcgcacggccggcc

SEQ ID NO: 5721 - DNA, 20 bp, Artificial Sequence
  Synthetic polynucleotide
gatggaaaggagatagatac

SEQ ID NO: 5722 - DNA, 20 bp, Artificial Sequence
  Synthetic polynucleotide
catggacgaggccacggctt

SEQ ID NO: 5723 - DNA, 20 bp, Artificial Sequence
  Synthetic polynucleotide
tcctcacgactggaagctca

SEQ ID NO: 5724 - DNA, 20 bp, Artificial Sequence
  Synthetic polynucleotide
aaactgttcatctgtctgtc

SEQ ID NO: 5725 - DNA, 20 bp, Artificial Sequence
  Synthetic polynucleotide
cgccgccgccgtggccgccg

SEQ ID NO: 5726 - DNA, 20 bp, Artificial Sequence
  Synthetic polynucleotide
gcggagcaccccaagccagg

SEQ ID NO: 5727 - DNA, 20 bp, Artificial Sequence
  Synthetic polynucleotide
agcacagtagaactaagtaa

SEQ ID NO: 5728 - DNA, 20 bp, Artificial Sequence
  Synthetic polynucleotide
ccatttggtcagaagacgga

SEQ ID NO: 5729 - DNA, 20 bp, Artificial Sequence
  Synthetic polynucleotide
gtgcggcggaggcgggggtg

SEQ ID NO: 5730 - DNA, 20 bp, Artificial Sequence
  Synthetic polynucleotide
taccgaggtgagcagaggca

SEQ ID NO: 5731 - DNA, 20 bp, Artificial Sequence
  Synthetic polynucleotide
gtgctgcgggacggcggcga

SEQ ID NO: 5732 - DNA, 20 bp, Artificial Sequence
  Synthetic polynucleotide
caggtattacgagacgagac

SEQ ID NO: 5733 - DNA, 20 bp, Artificial Sequence
  Synthetic polynucleotide
tggacagccacacagcacac

SEQ ID NO: 5734 - DNA, 20 bp, Artificial Sequence
  Synthetic polynucleotide
tgcggcggctgcggcggctg

SEQ ID NO: 5735 - DNA, 20 bp, Artificial Sequence
  Synthetic polynucleotide
cacgccctcaggagaggtgg

SEQ ID NO: 5736 - DNA, 20 bp, Artificial Sequence
  Synthetic polynucleotide
cggagaaggggggaagaagt

SEQ ID NO: 5737 - DNA, 20 bp, Artificial Sequence
  Synthetic polynucleotide
tccagctggctggaggaagg

SEQ ID NO: 5738 - DNA, 20 bp, Artificial Sequence
  Synthetic polynucleotide
caataatggctaaacaataa

SEQ ID NO: 5739 - DNA, 20 bp, Artificial Sequence
  Synthetic polynucleotide
gctcgtagatggtggcggcc

SEQ ID NO: 5740 - DNA, 20 bp, Artificial Sequence
  Synthetic polynucleotide
tgcgctgcaggaactgctgc

SEQ ID NO: 5741 - DNA, 20 bp, Artificial Sequence
  Synthetic polynucleotide
ccaggtcggccaggcaggcc

SEQ ID NO: 5742 - DNA, 20 bp, Artificial Sequence
  Synthetic polynucleotide
aaggttggctgtaccaaggt

SEQ ID NO: 5743 - DNA, 20 bp, Artificial Sequence
  Synthetic polynucleotide
gcaggtcacctggtgagtcc

SEQ ID NO: 5744 - DNA, 20 bp, Artificial Sequence
  Synthetic polynucleotide
tctcccagaggaagttatag

SEQ ID NO: 5745 - DNA, 20 bp, Artificial Sequence
  Synthetic polynucleotide
tctcccagatgtggtggttg

SEQ ID NO: 5746 - DNA, 20 bp, Artificial Sequence
  Synthetic polynucleotide
gctggatattcgggatattc

SEQ ID NO: 5747 - DNA, 20 bp, Artificial Sequence
  Synthetic polynucleotide
ctgatgctttgctgatgctt

SEQ ID NO: 5748 - DNA, 20 bp, Artificial Sequence
  Synthetic polynucleotide
aggcccgcgctgaggcggcg

SEQ ID NO: 5749 - DNA, 20 bp, Artificial Sequence
  Synthetic polynucleotide
gccagtgtggaagaacagtg

SEQ ID NO: 5750 - DNA, 20 bp, Artificial Sequence
  Synthetic polynucleotide
gctgttgtctttctgtcttt

SEQ ID NO: 5751 - DNA, 20 bp, Artificial Sequence
  Synthetic polynucleotide
ccagcagggaagctggtgca

SEQ ID NO: 5752 - DNA, 20 bp, Artificial Sequence
  Synthetic polynucleotide
acacactccctggaagtccc

SEQ ID NO: 5753 - DNA, 20 bp, Artificial Sequence
  Synthetic polynucleotide
cacggggctgcggctgctgg

SEQ ID NO: 5754 - DNA, 20 bp, Artificial Sequence
  Synthetic polynucleotide
caccgcctcttctcttggcc

SEQ ID NO: 5755 - DNA, 20 bp, Artificial Sequence
  Synthetic polynucleotide
gaggacctgcagcgggtggg

SEQ ID NO: 5756 - DNA, 20 bp, Artificial Sequence
  Synthetic polynucleotide
ccccggacggtgacggcgga

SEQ ID NO: 5757 - DNA, 20 bp, Artificial Sequence
  Synthetic polynucleotide
ccaggtccacgggcagacga

SEQ ID NO: 5758 - DNA, 20 bp, Artificial Sequence
  Synthetic polynucleotide
tgctcgtggtgatctgctcg

SEQ ID NO: 5759 - DNA, 20 bp, Artificial Sequence
  Synthetic polynucleotide
gcttcgaacccggctgctga

SEQ ID NO: 5760 - DNA, 20 bp, Artificial Sequence
  Synthetic polynucleotide
gatgagcactttatagcgca

SEQ ID NO: 5761 - DNA, 20 bp, Artificial Sequence
  Synthetic polynucleotide
agaccgagttcctatggatg

SEQ ID NO: 5762 - DNA, 20 bp, Artificial Sequence
  Synthetic polynucleotide
ccatgtggctgcatgggacg

SEQ ID NO: 5763 - DNA, 20 bp, Artificial Sequence
  Synthetic polynucleotide
tgtcggccttggggccgggc

SEQ ID NO: 5764 - DNA, 20 bp, Artificial Sequence
  Synthetic polynucleotide
acactctgtgcctgcgtgcg

SEQ ID NO: 5765 - DNA, 20 bp, Artificial Sequence
  Synthetic polynucleotide
cagcaagctgggcggggggg

SEQ ID NO: 5766 - DNA, 20 bp, Artificial Sequence
  Synthetic polynucleotide
tgctctctgtgtagtggtag

SEQ ID NO: 5767 - DNA, 20 bp, Artificial Sequence
  Synthetic polynucleotide
ggggatgcaggtggagctgt

SEQ ID NO: 5768 - DNA, 20 bp, Artificial Sequence
  Synthetic polynucleotide
tgtttttatcaacggcaggc

SEQ ID NO: 5769 - DNA, 20 bp, Artificial Sequence
  Synthetic polynucleotide
ggggagacggtgtggggaga

SEQ ID NO: 5770 - DNA, 20 bp, Artificial Sequence
  Synthetic polynucleotide
ccccccgaggagccaccccg

SEQ ID NO: 5771 - DNA, 20 bp, Artificial Sequence
  Synthetic polynucleotide
atcagggccagctggccagc

SEQ ID NO: 5772 - DNA, 20 bp, Artificial Sequence
  Synthetic polynucleotide
atgctcttctgcagagggag

SEQ ID NO: 5773 - DNA, 20 bp, Artificial Sequence
  Synthetic polynucleotide
ttgaggtagaaagggaacta

SEQ ID NO: 5774 - DNA, 20 bp, Artificial Sequence
  Synthetic polynucleotide
gtagatcttccaggtggagg

SEQ ID NO: 5775 - DNA, 20 bp, Artificial Sequence
  Synthetic polynucleotide
agtttcgctgccacttccga

SEQ ID NO: 5776 - DNA, 20 bp, Artificial Sequence
  Synthetic polynucleotide
ctaaggtatccctggatccc

SEQ ID NO: 5777 - DNA, 20 bp, Artificial Sequence
  Synthetic polynucleotide
agacggctaggtgctccaga

SEQ ID NO: 5778 - DNA, 20 bp, Artificial Sequence
  Synthetic polynucleotide
ggatgaagaggatgatgaag

SEQ ID NO: 5779 - DNA, 20 bp, Artificial Sequence
  Synthetic polynucleotide
tgtggagagaaactggtggg

SEQ ID NO: 5780 - DNA, 20 bp, Artificial Sequence
  Synthetic polynucleotide
cacaccgactcgctggagct

SEQ ID NO: 5781 - DNA, 20 bp, Artificial Sequence
  Synthetic polynucleotide
tccggcaggtgtcgtccggc

SEQ ID NO: 5782 - DNA, 20 bp, Artificial Sequence
  Synthetic polynucleotide
gatctctgctgctggtggaa

SEQ ID NO: 5783 - DNA, 20 bp, Artificial Sequence
  Synthetic polynucleotide
gcccgggaaggggcagggga

SEQ ID NO: 5784 - DNA, 20 bp, Artificial Sequence
  Synthetic polynucleotide
ggcccagcatacaggcctac

SEQ ID NO: 5785 - DNA, 20 bp, Artificial Sequence
  Synthetic polynucleotide
caatgaacttacgcttggct

SEQ ID NO: 5786 - DNA, 20 bp, Artificial Sequence
  Synthetic polynucleotide
tctgcacgctctgcaatcaa

SEQ ID NO: 5787 - DNA, 20 bp, Artificial Sequence
  Synthetic polynucleotide
cggcgcggtggcgcgggagg

SEQ ID NO: 5788 - DNA, 20 bp, Artificial Sequence
  Synthetic polynucleotide
cggcggcggggagccccggg

SEQ ID NO: 5789 - DNA, 20 bp, Artificial Sequence
  Synthetic polynucleotide
gacgacaagaagctggacgc

SEQ ID NO: 5790 - DNA, 20 bp, Artificial Sequence
  Synthetic polynucleotide
cagcggcggcgcagcagcag

SEQ ID NO: 5791 - DNA, 20 bp, Artificial Sequence
  Synthetic polynucleotide
ttgtccttgcagtcggggcg

SEQ ID NO: 5792 - DNA, 20 bp, Artificial Sequence
  Synthetic polynucleotide
aggtgttgaatggaattgaa

SEQ ID NO: 5793 - DNA, 20 bp, Artificial Sequence
  Synthetic polynucleotide
cggctggactcacggggtgg

SEQ ID NO: 5794 - DNA, 20 bp, Artificial Sequence
  Synthetic polynucleotide
cacttctaaactcctccccc

SEQ ID NO: 5795 - DNA, 20 bp, Artificial Sequence
  Synthetic polynucleotide
ggagccttcgatgcggaatg

SEQ ID NO: 5796 - DNA, 20 bp, Artificial Sequence
  Synthetic polynucleotide
tgataattaatatgaggatg

SEQ ID NO: 5797 - DNA, 20 bp, Artificial Sequence
  Synthetic polynucleotide
ggggccgggattggatggat

SEQ ID NO: 5798 - DNA, 20 bp, Artificial Sequence
  Synthetic polynucleotide
ataccggagccaatggtatc

SEQ ID NO: 5799 - DNA, 20 bp, Artificial Sequence
  Synthetic polynucleotide
agcacacaaaaatggaaaaa

SEQ ID NO: 5800 - DNA, 20 bp, Artificial Sequence
  Synthetic polynucleotide
gtctagatctcctcagtggg

SEQ ID NO: 5801 - DNA, 20 bp, Artificial Sequence
  Synthetic polynucleotide
cctcgcaggagtctgatgac

SEQ ID NO: 5802 - DNA, 20 bp, Artificial Sequence
  Synthetic polynucleotide
aacgggtcgccatcgacaac

SEQ ID NO: 5803 - DNA, 20 bp, Artificial Sequence
  Synthetic polynucleotide
tcgaactcccgcaccagacc

SEQ ID NO: 5804 - DNA, 20 bp, Artificial Sequence
  Synthetic polynucleotide
caaacttcggggggcggcgg

SEQ ID NO: 5805 - DNA, 20 bp, Artificial Sequence
  Synthetic polynucleotide
gcgtgggcacgggcagtgag

SEQ ID NO: 5806 - DNA, 20 bp, Artificial Sequence
  Synthetic polynucleotide
gttgtaaatgggggtgtaaa

SEQ ID NO: 5807 - DNA, 20 bp, Artificial Sequence
  Synthetic polynucleotide
ctcatagagtaacgagtaac

SEQ ID NO: 5808 - DNA, 20 bp, Artificial Sequence
  Synthetic polynucleotide
tcacggctcagacggcttca

SEQ ID NO: 5809 - DNA, 20 bp, Artificial Sequence
  Synthetic polynucleotide
ttagacgagcagctgcatgc

SEQ ID NO: 5810 - DNA, 20 bp, Artificial Sequence
  Synthetic polynucleotide
ggtgatcaaacgccccgccc

SEQ ID NO: 5811 - DNA, 20 bp, Artificial Sequence
  Synthetic polynucleotide
gtggtcggaggagacgtagg

SEQ ID NO: 5812 - DNA, 20 bp, Artificial Sequence
  Synthetic polynucleotide
agcaccaggcactggggctg

SEQ ID NO: 5813 - DNA, 20 bp, Artificial Sequence
  Synthetic polynucleotide
gagctggcgtttctgcgcag

SEQ ID NO: 5814 - DNA, 20 bp, Artificial Sequence
  Synthetic polynucleotide
ctggtagagctctgtcattt

SEQ ID NO: 5815 - DNA, 20 bp, Artificial Sequence
  Synthetic polynucleotide
atggtctccttggtagccct

SEQ ID NO: 5816 - DNA, 20 bp, Artificial Sequence
  Synthetic polynucleotide
ccacgtcaacaacggcaact

SEQ ID NO: 5817 - DNA, 20 bp, Artificial Sequence
  Synthetic polynucleotide
ggctaggtccaggtgcgtgc

SEQ ID NO: 5818 - DNA, 20 bp, Artificial Sequence
  Synthetic polynucleotide
tgtggctcctgcggctcctg

SEQ ID NO: 5819 - DNA, 20 bp, Artificial Sequence
  Synthetic polynucleotide
ctcttcctctgtgcgcccgc

SEQ ID NO: 5820 - DNA, 20 bp, Artificial Sequence
  Synthetic polynucleotide
gtgggggtgcggcggaggtg

SEQ ID NO: 5821 - DNA, 20 bp, Artificial Sequence
  Synthetic polynucleotide
gcagccaccaagagccggcc

SEQ ID NO: 5822 - DNA, 20 bp, Artificial Sequence
  Synthetic polynucleotide
acgaggccggcgatggccga

SEQ ID NO: 5823 - DNA, 20 bp, Artificial Sequence
  Synthetic polynucleotide
catggggctgctggcgctgc

SEQ ID NO: 5824 - DNA, 20 bp, Artificial Sequence
  Synthetic polynucleotide
cccaggccctgcagggcccc

SEQ ID NO: 5825 - DNA, 20 bp, Artificial Sequence
  Synthetic polynucleotide
ccacggagcggaaggtgtaa

SEQ ID NO: 5826 - DNA, 20 bp, Artificial Sequence
  Synthetic polynucleotide
agatttaaattccaaattcc

SEQ ID NO: 5827 - DNA, 20 bp, Artificial Sequence
  Synthetic polynucleotide
aagatagaaagggagaaaga

SEQ ID NO: 5828 - DNA, 20 bp, Artificial Sequence
  Synthetic polynucleotide
tcatcctctccatcgtgggt

SEQ ID NO: 5829 - DNA, 20 bp, Artificial Sequence
  Synthetic polynucleotide
aaaggttctgctagtgataa

SEQ ID NO: 5830 - DNA, 20 bp, Artificial Sequence
  Synthetic polynucleotide
gggatacctgacaggggagg

SEQ ID NO: 5831 - DNA, 20 bp, Artificial Sequence
  Synthetic polynucleotide
ggtcatgagcaacatggtca

SEQ ID NO: 5832 - DNA, 20 bp, Artificial Sequence
  Synthetic polynucleotide
cgtgggcctgtacacgtccg

SEQ ID NO: 5833 - DNA, 20 bp, Artificial Sequence
  Synthetic polynucleotide
aaactgtcaggaaaactgtc

SEQ ID NO: 5834 - DNA, 20 bp, Artificial Sequence
  Synthetic polynucleotide
ttgatgaaggagtgaggcgg

SEQ ID NO: 5835 - DNA, 20 bp, Artificial Sequence
  Synthetic polynucleotide
ctgcagaacattgggaacat

SEQ ID NO: 5836 - DNA, 20 bp, Artificial Sequence
  Synthetic polynucleotide
ccgggataccttggtatata

SEQ ID NO: 5837 - DNA, 20 bp, Artificial Sequence
  Synthetic polynucleotide
ccgggccgcggcagcggcgg

SEQ ID NO: 5838 - DNA, 20 bp, Artificial Sequence
  Synthetic polynucleotide
caaaaatggctgggtgtagt

SEQ ID NO: 5839 - DNA, 20 bp, Artificial Sequence
  Synthetic polynucleotide
cagaggcacttaactaactc

SEQ ID NO: 5840 - DNA, 20 bp, Artificial Sequence
  Synthetic polynucleotide
tgctgagttctaaggaagga

SEQ ID NO: 5841 - DNA, 20 bp, Artificial Sequence
  Synthetic polynucleotide
cactgcttgtggacaacaac

SEQ ID NO: 5842 - DNA, 20 bp, Artificial Sequence
  Synthetic polynucleotide
ggacggactggtcccccccc

SEQ ID NO: 5843 - DNA, 20 bp, Artificial Sequence
  Synthetic polynucleotide
ccttggtgcgtcatccatcc

SEQ ID NO: 5844 - DNA, 20 bp, Artificial Sequence
  Synthetic polynucleotide
aatgaactttccaggatagc

SEQ ID NO: 5845 - DNA, 20 bp, Artificial Sequence
  Synthetic polynucleotide
ggatgtcatctgtggatctg

SEQ ID NO: 5846 - DNA, 20 bp, Artificial Sequence
  Synthetic polynucleotide
ccctaacttagacttctttc

SEQ ID NO: 5847 - DNA, 20 bp, Artificial Sequence
  Synthetic polynucleotide
atgaagcccacagggactca

SEQ ID NO: 5848 - DNA, 20 bp, Artificial Sequence
  Synthetic polynucleotide
tgacaatggcctggggctga

SEQ ID NO: 5849 - DNA, 20 bp, Artificial Sequence
  Synthetic polynucleotide
acactcgcctgtgaagatga

SEQ ID NO: 5850 - DNA, 20 bp, Artificial Sequence
  Synthetic polynucleotide
ccagcagcagggcaacagcc

SEQ ID NO: 5851 - DNA, 20 bp, Artificial Sequence
  Synthetic polynucleotide
caaccacctccagcctggcc

SEQ ID NO: 5852 - DNA, 20 bp, Artificial Sequence
  Synthetic polynucleotide
atggaggggccggactggag

SEQ ID NO: 5853 - DNA, 20 bp, Artificial Sequence
  Synthetic polynucleotide
cgatggaggggccggactgg

SEQ ID NO: 5854 - DNA, 20 bp, Artificial Sequence
  Synthetic polynucleotide
cttgccctgggactccagcc

SEQ ID NO: 5855 - DNA, 20 bp, Artificial Sequence
  Synthetic polynucleotide
atcagaaggggtaatccaga

SEQ ID NO: 5856 - DNA, 20 bp, Artificial Sequence
  Synthetic polynucleotide
attaggtgggcttagatttg

SEQ ID NO: 5857 - DNA, 20 bp, Artificial Sequence
  Synthetic polynucleotide
agactgctcagggctactca

SEQ ID NO: 5858 - DNA, 20 bp, Artificial Sequence
  Synthetic polynucleotide
tgccgtggggcccagtcccg

SEQ ID NO: 5859 - DNA, 20 bp, Artificial Sequence
  Synthetic polynucleotide
gccacacgggccttgacgta

SEQ ID NO: 5860 - DNA, 20 bp, Artificial Sequence
  Synthetic polynucleotide
cgtcgccccggggccgcccc

SEQ ID NO: 5861 - DNA, 20 bp, Artificial Sequence
  Synthetic polynucleotide
ctcacggtgggccttcacgg

SEQ ID NO: 5862 - DNA, 20 bp, Artificial Sequence
  Synthetic polynucleotide
gacatcatgtgcggggatgc

SEQ ID NO: 5863 - DNA, 20 bp, Artificial Sequence
  Synthetic polynucleotide
tggcgatggtggcgagccgg

SEQ ID NO: 5864 - DNA, 20 bp, Artificial Sequence
  Synthetic polynucleotide
gttcatgatggctggcatga

SEQ ID NO: 5865 - DNA, 20 bp, Artificial Sequence
  Synthetic polynucleotide
agtgctggctgtgccagagc

SEQ ID NO: 5866 - DNA, 20 bp, Artificial Sequence
  Synthetic polynucleotide
gatgctggctgtgccagtgc

SEQ ID NO: 5867 - DNA, 20 bp, Artificial Sequence
  Synthetic polynucleotide
acgtcgccccggggccgccc

SEQ ID NO: 5868 - DNA, 20 bp, Artificial Sequence
  Synthetic polynucleotide
tccagcctggagtcccaggc

SEQ ID NO: 5869 - DNA, 20 bp, Artificial Sequence
  Synthetic polynucleotide
aacctgggcaagctggacct

SEQ ID NO: 5870 - DNA, 20 bp, Artificial Sequence
  Synthetic polynucleotide
tgctgcggacgccgggacgc

SEQ ID NO: 5871 - DNA, 20 bp, Artificial Sequence
  Synthetic polynucleotide
ggccgaggacttgccgcaga

SEQ ID NO: 5872 - DNA, 20 bp, Artificial Sequence
  Synthetic polynucleotide
aagctgaggccgaaaagctg

SEQ ID NO: 5873 - DNA, 20 bp, Artificial Sequence
  Synthetic polynucleotide
agacatcatgtgcggggatg

SEQ ID NO: 5874 - DNA, 20 bp, Artificial Sequence
  Synthetic polynucleotide
gcggctccgggactgggccc

SEQ ID NO: 5875 - DNA, 20 bp, Artificial Sequence
  Synthetic polynucleotide
accatggtggacggcaccct

SEQ ID NO: 5876 - DNA, 20 bp, Artificial Sequence
  Synthetic polynucleotide
cgcgtccgcgccatgggcca

SEQ ID NO: 5877 - DNA, 20 bp, Artificial Sequence
  Synthetic polynucleotide
ctggtactcctgggtctcct

SEQ ID NO: 5878 - DNA, 20 bp, Artificial Sequence
  Synthetic polynucleotide
ccaggggacccaggagaccc

SEQ ID NO: 5879 - DNA, 20 bp, Artificial Sequence
  Synthetic polynucleotide
tgaagacaaaaggaggatca

SEQ ID NO: 5880 - DNA, 20 bp, Artificial Sequence
  Synthetic polynucleotide
aggtgcggctgcagcaggtg

SEQ ID NO: 5881 - DNA, 20 bp, Artificial Sequence
  Synthetic polynucleotide
ttccagttacctccatggca

SEQ ID NO: 5882 - DNA, 20 bp, Artificial Sequence
  Synthetic polynucleotide
ctcacatggtggagagtgga

SEQ ID NO: 5883 - DNA, 20 bp, Artificial Sequence
  Synthetic polynucleotide
ctgccgtggggcccagtccc

SEQ ID NO: 5884 - DNA, 20 bp, Artificial Sequence
  Synthetic polynucleotide
tgtccttgcagtcggcagtc

SEQ ID NO: 5885 - DNA, 20 bp, Artificial Sequence
  Synthetic polynucleotide
gcttgggccggggcggtttg

SEQ ID NO: 5886 - DNA, 20 bp, Artificial Sequence
  Synthetic polynucleotide
cgccatggcgatgagcgcca

SEQ ID NO: 5887 - DNA, 20 bp, Artificial Sequence
  Synthetic polynucleotide
tctgccgtggggcccagtcc

SEQ ID NO: 5888 - DNA, 20 bp, Artificial Sequence
  Synthetic polynucleotide
tggggcaggcggcggtgcgg

SEQ ID NO: 5889 - DNA, 20 bp, Artificial Sequence
  Synthetic polynucleotide
gacggtgaagacggtgaaga

SEQ ID NO: 5890 - DNA, 20 bp, Artificial Sequence
  Synthetic polynucleotide
ccttcccagtgaggcaggca

SEQ ID NO: 5891 - DNA, 20 bp, Artificial Sequence
  Synthetic polynucleotide
agacagtgaggaggaagaag

SEQ ID NO: 5892 - DNA, 20 bp, Artificial Sequence
  Synthetic polynucleotide
aaaagccagggataaaagcc

SEQ ID NO: 5893 - DNA, 20 bp, Artificial Sequence
  Synthetic polynucleotide
gaactttgcagacgaggacg

SEQ ID NO: 5894 - DNA, 20 bp, Artificial Sequence
  Synthetic polynucleotide
tgtgggtgctgagggtgccg

SEQ ID NO: 5895 - DNA, 20 bp, Artificial Sequence
  Synthetic polynucleotide
gggccgggccgggcagggca

SEQ ID NO: 5896 - DNA, 20 bp, Artificial Sequence
  Synthetic polynucleotide
tgacgtgggctgggccgggc

SEQ ID NO: 5897 - DNA, 20 bp, Artificial Sequence
  Synthetic polynucleotide
aggctgtgcgggaaatgtgc

SEQ ID NO: 5898 - DNA, 20 bp, Artificial Sequence
  Synthetic polynucleotide
tcaccagtgtgggcttcgtg

SEQ ID NO: 5899 - DNA, 20 bp, Artificial Sequence
  Synthetic polynucleotide
actgcgctgagggcccgctg

SEQ ID NO: 5900 - DNA, 20 bp, Artificial Sequence
  Synthetic polynucleotide
ctgcgctgagggcccgctga

SEQ ID NO: 5901 - DNA, 20 bp, Artificial Sequence
  Synthetic polynucleotide
agtacactatcctggaatcc

SEQ ID NO: 5902 - DNA, 20 bp, Artificial Sequence
  Synthetic polynucleotide
cacggcagcgggccctcagc

SEQ ID NO: 5903 - DNA, 20 bp, Artificial Sequence
  Synthetic polynucleotide
atcagtgcgaggtcggcatg

SEQ ID NO: 5904 - DNA, 20 bp, Artificial Sequence
  Synthetic polynucleotide
gctggcagacggggccagac

SEQ ID NO: 5905 - DNA, 20 bp, Artificial Sequence
  Synthetic polynucleotide
ctgtagtcgtgggcagtcgt

SEQ ID NO: 5906 - DNA, 20 bp, Artificial Sequence
  Synthetic polynucleotide
ggtatgggcggggccagggc

SEQ ID NO: 5907 - DNA, 20 bp, Artificial Sequence
  Synthetic polynucleotide
gctgatcctgggccgcttct

SEQ ID NO: 5908 - DNA, 20 bp, Artificial Sequence
  Synthetic polynucleotide
ggcggcgcgggcctcccgcg

SEQ ID NO: 5909 - DNA, 20 bp, Artificial Sequence
  Synthetic polynucleotide
gggtcagcctggaggcctgg

SEQ ID NO: 5910 - DNA, 20 bp, Artificial Sequence
  Synthetic polynucleotide
ttgcttcaggcccttgcttc

SEQ ID NO: 5911 - DNA, 20 bp, Artificial Sequence
  Synthetic polynucleotide
ctggtccggcaggtgtcgtc

SEQ ID NO: 5912 - DNA, 20 bp, Artificial Sequence
  Synthetic polynucleotide
cccccaccctggccccgccc

SEQ ID NO: 5913 - DNA, 20 bp, Artificial Sequence
  Synthetic polynucleotide
gacatggggcaaccttctcg

SEQ ID NO: 5914 - DNA, 20 bp, Artificial Sequence
  Synthetic polynucleotide
ctgcgccgggaggcccgcgc

SEQ ID NO: 5915 - DNA, 20 bp, Artificial Sequence
  Synthetic polynucleotide
ccaagaccgggtctcaagac

SEQ ID NO: 5916 - DNA, 20 bp, Artificial Sequence
  Synthetic polynucleotide
gcacgtggcctaccggagac

SEQ ID NO: 5917 - DNA, 20 bp, Artificial Sequence
  Synthetic polynucleotide
catcagtggggcgctggagt

SEQ ID NO: 5918 - DNA, 20 bp, Artificial Sequence
  Synthetic polynucleotide
aaaatcgttttagggtttta

SEQ ID NO: 5919 - DNA, 20 bp, Artificial Sequence
  Synthetic polynucleotide
agggcagccaggacgccgcc

SEQ ID NO: 5920 - DNA, 20 bp, Artificial Sequence
  Synthetic polynucleotide
tcatcagtggggcgctggag

SEQ ID NO: 5921 - DNA, 20 bp, Artificial Sequence
  Synthetic polynucleotide
ggcggaactgggggcggaac

SEQ ID NO: 5922 - DNA, 20 bp, Artificial Sequence
  Synthetic polynucleotide
ctggcagacggggccagacg

SEQ ID NO: 5923 - DNA, 20 bp, Artificial Sequence
  Synthetic polynucleotide
gagtgttcatctgggaatct

SEQ ID NO: 5924 - DNA, 20 bp, Artificial Sequence
  Synthetic polynucleotide
cggtatgggcggggccaggg

SEQ ID NO: 5925 - DNA, 20 bp, Artificial Sequence
  Synthetic polynucleotide
agctcaaggtggagacaagg

SEQ ID NO: 5926 - DNA, 20 bp, Artificial Sequence
  Synthetic polynucleotide
cgcggtgcggtccgggactg

SEQ ID NO: 5927 - DNA, 20 bp, Artificial Sequence
  Synthetic polynucleotide
ggtggcctttgcggcctctg

SEQ ID NO: 5928 - DNA, 20 bp, Artificial Sequence
  Synthetic polynucleotide
actggatcacagggatcaca

SEQ ID NO: 5929 - DNA, 20 bp, Artificial Sequence
  Synthetic polynucleotide
catgaagggctgggaggcaa

SEQ ID NO: 5930 - DNA, 20 bp, Artificial Sequence
  Synthetic polynucleotide
gaaaagggtccagatggaaa

SEQ ID NO: 5931 - DNA, 20 bp, Artificial Sequence
  Synthetic polynucleotide
ggccccggggcgacggcccc

SEQ ID NO: 5932 - DNA, 20 bp, Artificial Sequence
  Synthetic polynucleotide
ctcggcggggaggtgctcgg

SEQ ID NO: 5933 - DNA, 20 bp, Artificial Sequence
  Synthetic polynucleotide
gcggtccgggactgcggtcc

SEQ ID NO: 5934 - DNA, 20 bp, Artificial Sequence
  Synthetic polynucleotide
gagatgagaaggggaggaga

SEQ ID NO: 5935 - DNA, 20 bp, Artificial Sequence
  Synthetic polynucleotide
gctgggatgctgggccccgc

SEQ ID NO: 5936 - DNA, 20 bp, Artificial Sequence
  Synthetic polynucleotide
aaccggggcactgcagctac

SEQ ID NO: 5937 - DNA, 20 bp, Artificial Sequence
  Synthetic polynucleotide
gatgttggtacagccaacct

SEQ ID NO: 5938 - DNA, 20 bp, Artificial Sequence
  Synthetic polynucleotide
cagatggcctccaggcctcc

SEQ ID NO: 5939 - DNA, 20 bp, Artificial Sequence
  Synthetic polynucleotide
ggtgggggtgcggcggaggt

SEQ ID NO: 5940 - DNA, 20 bp, Artificial Sequence
  Synthetic polynucleotide
cgggggcttctttagcccgg

SEQ ID NO: 5941 - DNA, 20 bp, Artificial Sequence
  Synthetic polynucleotide
agcagctgacagagggttag

SEQ ID NO: 5942 - DNA, 20 bp, Artificial Sequence
  Synthetic polynucleotide
ggaccgggagcaccaggacc

SEQ ID NO: 5943 - DNA, 20 bp, Artificial Sequence
  Synthetic polynucleotide
cagatggccagctggccagc

SEQ ID NO: 5944 - DNA, 20 bp, Artificial Sequence
  Synthetic polynucleotide
gcggaactgggggcggaact

SEQ ID NO: 5945 - DNA, 20 bp, Artificial Sequence
  Synthetic polynucleotide
gggtgggggtgcggcggagg

SEQ ID NO: 5946 - DNA, 20 bp, Artificial Sequence
  Synthetic polynucleotide
atgcttccaaggccattcca

SEQ ID NO: 5947 - DNA, 20 bp, Artificial Sequence
  Synthetic polynucleotide
tgggggtgcggcggaggtgg

SEQ ID NO: 5948 - DNA, 20 bp, Artificial Sequence
  Synthetic polynucleotide
ccctgctgctggccagctgc

SEQ ID NO: 5949 - DNA, 20 bp, Artificial Sequence
  Synthetic polynucleotide
tggttgggatggggctggat

SEQ ID NO: 5950 - DNA, 20 bp, Artificial Sequence
  Synthetic polynucleotide
aggcgggggtgcggccgagg

SEQ ID NO: 5951 - DNA, 20 bp, Artificial Sequence
  Synthetic polynucleotide
gagaaggggaggagaagggg

SEQ ID NO: 5952 - DNA, 20 bp, Artificial Sequence
  Synthetic polynucleotide
gcaaggatgccttcagagca

SEQ ID NO: 5953 - DNA, 20 bp, Artificial Sequence
  Synthetic polynucleotide
gctgaaggggaaggctcgaa

SEQ ID NO: 5954 - DNA, 20 bp, Artificial Sequence
  Synthetic polynucleotide
cgaaggcctgtgggtgctgt

SEQ ID NO: 5955 - DNA, 20 bp, Artificial Sequence
  Synthetic polynucleotide
gcacggctcaggtgccagca

SEQ ID NO: 5956 - DNA, 20 bp, Artificial Sequence
  Synthetic polynucleotide
tccgggctaaagaagccccc

SEQ ID NO: 5957 - DNA, 20 bp, Artificial Sequence
  Synthetic polynucleotide
agtcaggtggctcctcgggg

SEQ ID NO: 5958 - DNA, 20 bp, Artificial Sequence
  Synthetic polynucleotide
gcgggggcttctttagcccg

SEQ ID NO: 5959 - DNA, 20 bp, Artificial Sequence
  Synthetic polynucleotide
catctggtggaatggggccc

SEQ ID NO: 5960 - DNA, 20 bp, Artificial Sequence
  Synthetic polynucleotide
tgctgatcctgggccgcttc

SEQ ID NO: 5961 - DNA, 20 bp, Artificial Sequence
  Synthetic polynucleotide
gcccgggaaggggcatggga

SEQ ID NO: 5962 - DNA, 20 bp, Artificial Sequence
  Synthetic polynucleotide
agcagaccagggccccacca

SEQ ID NO: 5963 - DNA, 20 bp, Artificial Sequence
  Synthetic polynucleotide
ttccctttgaggatccagat

SEQ ID NO: 5964 - DNA, 20 bp, Artificial Sequence
  Synthetic polynucleotide
gatgagaaggggaggagaag

SEQ ID NO: 5965 - DNA, 20 bp, Artificial Sequence
  Synthetic polynucleotide
ggcatcccggggccctggtg

SEQ ID NO: 5966 - DNA, 20 bp, Artificial Sequence
  Synthetic polynucleotide
ggcccgggaggcgaaccccc

SEQ ID NO: 5967 - DNA, 20 bp, Artificial Sequence
  Synthetic polynucleotide
aaacgggtcgccatcgacaa

SEQ ID NO: 5968 - DNA, 20 bp, Artificial Sequence
  Synthetic polynucleotide
gtgggcctgtacacgtccgt

SEQ ID NO: 5969 - DNA, 20 bp, Artificial Sequence
  Synthetic polynucleotide
gaatggaccagccccgggaa

SEQ ID NO: 5970 - DNA, 20 bp, Artificial Sequence
  Synthetic polynucleotide
gcggtgcatgggctgcgcat

SEQ ID NO: 5971 - DNA, 20 bp, Artificial Sequence
  Synthetic polynucleotide
gatggttttggtggaggaag

SEQ ID NO: 5972 - DNA, 20 bp, Artificial Sequence
  Synthetic polynucleotide
cgcgggcgtcctgctcgccg

SEQ ID NO: 5973 - DNA, 20 bp, Artificial Sequence
  Synthetic polynucleotide
gggcggcggccggaagggcg

SEQ ID NO: 5974 - DNA, 20 bp, Artificial Sequence
  Synthetic polynucleotide
atatcagtctgtgggactgt

SEQ ID NO: 5975 - DNA, 20 bp, Artificial Sequence
  Synthetic polynucleotide
cggcgggcgcagccggtcgg

SEQ ID NO: 5976 - DNA, 20 bp, Artificial Sequence
  Synthetic polynucleotide
cctgcgccgggaggcccgcg

SEQ ID NO: 5977 - DNA, 20 bp, Artificial Sequence
  Synthetic polynucleotide
aaagggccttcctgaggaaa

SEQ ID NO: 5978 - DNA, 20 bp, Artificial Sequence
  Synthetic polynucleotide
ctcaggtgccagcacggctc

SEQ ID NO: 5979 - DNA, 20 bp, Artificial Sequence
  Synthetic polynucleotide
tgacggaacttgcgctccag

SEQ ID NO: 5980 - DNA, 20 bp, Artificial Sequence
  Synthetic polynucleotide
aggcgggggtgcggccgggg

SEQ ID NO: 5981 - DNA, 20 bp, Artificial Sequence
  Synthetic polynucleotide
gcgggggtgcggccggggcg

SEQ ID NO: 5982 - DNA, 20 bp, Artificial Sequence
  Synthetic polynucleotide
ggcgggggtgcggccgaggc

SEQ ID NO: 5983 - DNA, 20 bp, Artificial Sequence
  Synthetic polynucleotide
ccgggcagggccacacgcgc

SEQ ID NO: 5984 - DNA, 20 bp, Artificial Sequence
  Synthetic polynucleotide
agggggcggaggcctggcaa

SEQ ID NO: 5985 - DNA, 20 bp, Artificial Sequence
  Synthetic polynucleotide
ttgtaaatgggggtgtaaat

SEQ ID NO: 5986 - DNA, 20 bp, Artificial Sequence
  Synthetic polynucleotide
cgggggcatctatgtctgcg

SEQ ID NO: 5987 - DNA, 20 bp, Artificial Sequence
  Synthetic polynucleotide
aagagggccccattccacca

SEQ ID NO: 5988 - DNA, 20 bp, Artificial Sequence
  Synthetic polynucleotide
tgggggtgcggcggaggcgg

SEQ ID NO: 5989 - DNA, 20 bp, Artificial Sequence
  Synthetic polynucleotide
gtgcggcgggaggaggcggc

SEQ ID NO: 5990 - DNA, 20 bp, Artificial Sequence
  Synthetic polynucleotide
gccccggggcgacggccccg

SEQ ID NO: 5991 - DNA, 20 bp, Artificial Sequence
  Synthetic polynucleotide
cgggcagggccacacgcgcc

SEQ ID NO: 5992 - DNA, 20 bp, Artificial Sequence
  Synthetic polynucleotide
atgggagcagcaggtgtcga

SEQ ID NO: 5993 - DNA, 20 bp, Artificial Sequence
  Synthetic polynucleotide
tcattatagtcaagggcata

SEQ ID NO: 5994 - DNA, 20 bp, Artificial Sequence
  Synthetic polynucleotide
agagctcctcggacgctcct

SEQ ID NO: 5995 - DNA, 20 bp, Artificial Sequence
  Synthetic polynucleotide
cgggagacggggctggagac

SEQ ID NO: 5996 - DNA, 20 bp, Artificial Sequence
  Synthetic polynucleotide
gccgccggcccgcgggcccg

SEQ ID NO: 5997 - DNA, 20 bp, Artificial Sequence
  Synthetic polynucleotide
ggttgggatggggctggatg

SEQ ID NO: 5998 - DNA, 20 bp, Artificial Sequence
  Synthetic polynucleotide
actgctcgggccgcgggccg

SEQ ID NO: 5999 - DNA, 20 bp, Artificial Sequence
  Synthetic polynucleotide
ggaccccggggcaccgggag

SEQ ID NO: 6000 - DNA, 20 bp, Artificial Sequence
  Synthetic polynucleotide
cgctgaaggggaaggctcga

SEQ ID NO: 6001 - DNA, 20 bp, Artificial Sequence
  Synthetic polynucleotide
cggcgggaggaggcggcggg

SEQ ID NO: 6002 - DNA, 20 bp, Artificial Sequence
  Synthetic polynucleotide
tccctctacgcctccgcctc

SEQ ID NO: 6003 - DNA, 20 bp, Artificial Sequence
  Synthetic polynucleotide
aaccacctccagcctggcct

SEQ ID NO: 6004 - DNA, 20 bp, Artificial Sequence
  Synthetic polynucleotide
gctggagatctcggaggcat

SEQ ID NO: 6005 - DNA, 20 bp, Artificial Sequence
  Synthetic polynucleotide
atggatcttacagggttaca

SEQ ID NO: 6006 - DNA, 20 bp, Artificial Sequence
  Synthetic polynucleotide
cgcaaaggggcggacgctga

SEQ ID NO: 6007 - DNA, 20 bp, Artificial Sequence
  Synthetic polynucleotide
gaaggggaaattgcacaagc

SEQ ID NO: 6008 - DNA, 20 bp, Artificial Sequence
  Synthetic polynucleotide
ccgggaaggggcatgggaag

SEQ ID NO: 6009 - DNA, 20 bp, Artificial Sequence
  Synthetic polynucleotide
ctgttctgaaggcaggtgca

SEQ ID NO: 6010 - DNA, 20 bp, Artificial Sequence
  Synthetic polynucleotide
ttggggtgctccgcctggct

SEQ ID NO: 6011 - DNA, 20 bp, Artificial Sequence
  Synthetic polynucleotide
tccgagcggcggctccgggg

SEQ ID NO: 6012 - DNA, 20 bp, Artificial Sequence
  Synthetic polynucleotide
cccggggcccgcgggcccgc

SEQ ID NO: 6013 - DNA, 20 bp, Artificial Sequence
  Synthetic polynucleotide
cccggcggcacacggcccgg

SEQ ID NO: 6014 - DNA, 20 bp, Artificial Sequence
  Synthetic polynucleotide
atctgcacgcggccgccgcg

SEQ ID NO: 6015 - DNA, 20 bp, Artificial Sequence
  Synthetic polynucleotide
gcgggcgtcctgctcgccgc

SEQ ID NO: 6016 - DNA, 20 bp, Artificial Sequence
  Synthetic polynucleotide
aggcgcagcagggccgcagc

SEQ ID NO: 6017 - DNA, 20 bp, Artificial Sequence
  Synthetic polynucleotide
acagcagccgcaggagccgc

SEQ ID NO: 6018 - DNA, 20 bp, Artificial Sequence
  Synthetic polynucleotide
aatggcacctggccccaaaa

SEQ ID NO: 6019 - DNA, 20 bp, Artificial Sequence
  Synthetic polynucleotide
cccgggaaggggcaggggaa

SEQ ID NO: 6020 - DNA, 20 bp, Artificial Sequence
  Synthetic polynucleotide
ttgctgcagatccgtgggcg

SEQ ID NO: 6021 - DNA, 20 bp, Artificial Sequence
  Synthetic polynucleotide
gagaggagctggacttgctc

SEQ ID NO: 6022 - DNA, 20 bp, Artificial Sequence
  Synthetic polynucleotide
ggaggggctggtccattccc

SEQ ID NO: 6023 - DNA, 20 bp, Artificial Sequence
  Synthetic polynucleotide
gtgctcactctgccaggcca

SEQ ID NO: 6024 - DNA, 20 bp, Artificial Sequence
  Synthetic polynucleotide
ggcgcagcagggccgcagca

SEQ ID NO: 6025 - DNA, 20 bp, Artificial Sequence
  Synthetic polynucleotide
ggggcggtttggggcggttt

SEQ ID NO: 6026 - DNA, 20 bp, Artificial Sequence
  Synthetic polynucleotide
ccgcgggagcgagggagcga

SEQ ID NO: 6027 - DNA, 20 bp, Artificial Sequence
  Synthetic polynucleotide
aagggctgggaggcaagggc

SEQ ID NO: 6028 - DNA, 20 bp, Artificial Sequence
  Synthetic polynucleotide
gaccccggggcaccgggagc

SEQ ID NO: 6029 - DNA, 20 bp, Artificial Sequence
  Synthetic polynucleotide
acccggggcccgcgggcccg

SEQ ID NO: 6030 - DNA, 20 bp, Artificial Sequence
  Synthetic polynucleotide
tgtaaatgggggtgtaaatg

SEQ ID NO: 6031 - DNA, 20 bp, Artificial Sequence
  Synthetic polynucleotide
ttctgaaggcaggtgaaggc

SEQ ID NO: 6032 - DNA, 20 bp, Artificial Sequence
  Synthetic polynucleotide
gggcaaggaggtggggttgt

SEQ ID NO: 6033 - DNA, 20 bp, Artificial Sequence
  Synthetic polynucleotide
aaggtgcaggtgggtgcagg

SEQ ID NO: 6034 - DNA, 20 bp, Artificial Sequence
  Synthetic polynucleotide
cggcgggctcgggctgcggc

SEQ ID NO: 6035 - DNA, 20 bp, Artificial Sequence
  Synthetic polynucleotide
ggcagccggcggaccagagg

SEQ ID NO: 6036 - DNA, 20 bp, Artificial Sequence
  Synthetic polynucleotide
acgggggcatctatgtctgc

SEQ ID NO: 6037 - DNA, 20 bp, Artificial Sequence
  Synthetic polynucleotide
acccgcggggagacggtgtg

SEQ ID NO: 6038 - DNA, 20 bp, Artificial Sequence
  Synthetic polynucleotide
cctatgcaggtgtccaacgg

SEQ ID NO: 6039 - DNA, 20 bp, Artificial Sequence
  Synthetic polynucleotide
gtgctggaaaagggtccaga

SEQ ID NO: 6040 - DNA, 20 bp, Artificial Sequence
  Synthetic polynucleotide
atgggcatgcagggcatgca

SEQ ID NO: 6041 - DNA, 20 bp, Artificial Sequence
  Synthetic polynucleotide
tcggcggggaggtgctcggc

SEQ ID NO: 6042 - DNA, 20 bp, Artificial Sequence
  Synthetic polynucleotide
tggggtgctccgcctggctt

SEQ ID NO: 6043 - DNA, 20 bp, Artificial Sequence
  Synthetic polynucleotide
gggcacatctgggtgcatct

SEQ ID NO: 6044 - DNA, 20 bp, Artificial Sequence
  Synthetic polynucleotide
ctttgcttccagggacttcc

SEQ ID NO: 6045 - DNA, 20 bp, Artificial Sequence
  Synthetic polynucleotide
cgcggggccccggggccccg

SEQ ID NO: 6046 - DNA, 20 bp, Artificial Sequence
  Synthetic polynucleotide
gaggtgggggctggggcgtg

SEQ ID NO: 6047 - DNA, 20 bp, Artificial Sequence
  Synthetic polynucleotide
cgcgcctggccccggggccc

SEQ ID NO: 6048 - DNA, 20 bp, Artificial Sequence
  Synthetic polynucleotide
ggacatggggcaaccttctc

SEQ ID NO: 6049 - DNA, 20 bp, Artificial Sequence
  Synthetic polynucleotide
cgggaggcgaaccccccggg

SEQ ID NO: 6050 - DNA, 20 bp, Artificial Sequence
  Synthetic polynucleotide
tgggggtcttcctttgcctg

SEQ ID NO: 6051 - DNA, 20 bp, Artificial Sequence
  Synthetic polynucleotide
gggcatcccggggccctggt

SEQ ID NO: 6052 - DNA, 20 bp, Artificial Sequence
  Synthetic polynucleotide
ggaggtgggggctggggcgt

SEQ ID NO: 6053 - DNA, 20 bp, Artificial Sequence
  Synthetic polynucleotide
ggggccctgggggaagcctg

SEQ ID NO: 6054 - DNA, 20 bp, Artificial Sequence
  Synthetic polynucleotide
ggcccggggaccaggggacc

SEQ ID NO: 6055 - DNA, 20 bp, Artificial Sequence
  Synthetic polynucleotide
cggggctggcgcggctggcg

SEQ ID NO: 6056 - DNA, 20 bp, Artificial Sequence
  Synthetic polynucleotide
cgcctggccccggggccccg

SEQ ID NO: 6057 - DNA, 20 bp, Artificial Sequence
  Synthetic polynucleotide
acagaaaaaagagggaaaga

SEQ ID NO: 6058 - DNA, 20 bp, Artificial Sequence
  Synthetic polynucleotide
cagggtgctcacggccatgc

SEQ ID NO: 6059 - DNA, 20 bp, Artificial Sequence
  Synthetic polynucleotide
tggctgggagagtccgacgt

SEQ ID NO: 6060 - DNA, 20 bp, Artificial Sequence
  Synthetic polynucleotide
ctgctggttccatgtgctgc

SEQ ID NO: 6061 - DNA, 20 bp, Artificial Sequence
  Synthetic polynucleotide
cccgccttgggggcgaggcg

SEQ ID NO: 6062 - DNA, 20 bp, Artificial Sequence
  Synthetic polynucleotide
cgtccgcagcccgcggcccg

SEQ ID NO: 6063 - DNA, 20 bp, Artificial Sequence
  Synthetic polynucleotide
ctggtgctgaagcctcctgc

SEQ ID NO: 6064 - DNA, 20 bp, Artificial Sequence
  Synthetic polynucleotide
caggtggccgtcgaggaccg

SEQ ID NO: 6065 - DNA, 20 bp, Artificial Sequence
  Synthetic polynucleotide
tagaggtcgatggccccgtc

SEQ ID NO: 6066 - DNA, 20 bp, Artificial Sequence
  Synthetic polynucleotide
tggctgcgctgggctgcgct

SEQ ID NO: 6067 - DNA, 20 bp, Artificial Sequence
  Synthetic polynucleotide
gctggtcctgctggtcctgc

SEQ ID NO: 6068 - DNA, 20 bp, Artificial Sequence
  Synthetic polynucleotide
cggaggcgggggtgcggccg

SEQ ID NO: 6069 - DNA, 20 bp, Artificial Sequence
  Synthetic polynucleotide
cccccaggaggtgaggttgc

SEQ ID NO: 6070 - DNA, 20 bp, Artificial Sequence
  Synthetic polynucleotide
ggggcggggctgggctgggc

SEQ ID NO: 6071 - DNA, 20 bp, Artificial Sequence
  Synthetic polynucleotide
gcgcctggccccggggcccc

SEQ ID NO: 6072 - DNA, 20 bp, Artificial Sequence
  Synthetic polynucleotide
gggctgtgggcagtgggcag

SEQ ID NO: 6073 - DNA, 20 bp, Artificial Sequence
  Synthetic polynucleotide
gcaggaccaacaggaccaac

SEQ ID NO: 6074 - DNA, 20 bp, Artificial Sequence
  Synthetic polynucleotide
gggtggagggtggaacgtgg

SEQ ID NO: 6075 - DNA, 20 bp, Artificial Sequence
  Synthetic polynucleotide
gggaggggctggtccattcc

SEQ ID NO: 6076 - DNA, 20 bp, Artificial Sequence
  Synthetic polynucleotide
gctgccttcgggccgccttc

SEQ ID NO: 6077 - DNA, 20 bp, Artificial Sequence
  Synthetic polynucleotide
cttcgtgggcaaggtgtggc

SEQ ID NO: 6078 - DNA, 20 bp, Artificial Sequence
  Synthetic polynucleotide
gtttcaagtggggcccagcg

SEQ ID NO: 6079 - DNA, 20 bp, Artificial Sequence
  Synthetic polynucleotide
caggaggcttcagcaccagc

SEQ ID NO: 6080 - DNA, 20 bp, Artificial Sequence
  Synthetic polynucleotide
gaaggccggccggtcggcga

SEQ ID NO: 6081 - DNA, 20 bp, Artificial Sequence
  Synthetic polynucleotide
gcgcaaaggggcggacgctg

SEQ ID NO: 6082 - DNA, 20 bp, Artificial Sequence
  Synthetic polynucleotide
acgcggtggaggcagggtgg

SEQ ID NO: 6083 - DNA, 20 bp, Artificial Sequence
  Synthetic polynucleotide
acaggtggcggtgttgtacg

SEQ ID NO: 6084 - DNA, 20 bp, Artificial Sequence
  Synthetic polynucleotide
ctgcggtatgggcggggcca

SEQ ID NO: 6085 - DNA, 20 bp, Artificial Sequence
  Synthetic polynucleotide
aggaggagatggaggccggg

SEQ ID NO: 6086 - DNA, 20 bp, Artificial Sequence
  Synthetic polynucleotide
gcagcggacctcgggagcag

SEQ ID NO: 6087 - DNA, 20 bp, Artificial Sequence
  Synthetic polynucleotide
aagggtcgaggtaagggaaa

SEQ ID NO: 6088 - DNA, 20 bp, Artificial Sequence
  Synthetic polynucleotide
acagggtgctcacggccatg

SEQ ID NO: 6089 - DNA, 20 bp, Artificial Sequence
  Synthetic polynucleotide
gggggtcttcctttgcctgg

SEQ ID NO: 6090 - DNA, 20 bp, Artificial Sequence
  Synthetic polynucleotide
cacccgcggggagacggtgt

SEQ ID NO: 6091 - DNA, 20 bp, Artificial Sequence
  Synthetic polynucleotide
tgggagagtccgacgttggc

SEQ ID NO: 6092 - DNA, 20 bp, Artificial Sequence
  Synthetic polynucleotide
aggtgggggctggggcgtgg

SEQ ID NO: 6093 - DNA, 20 bp, Artificial Sequence
  Synthetic polynucleotide
cgcaagatggaggtgggagg

SEQ ID NO: 6094 - DNA, 20 bp, Artificial Sequence
  Synthetic polynucleotide
tcacccgcggggagacggtg

SEQ ID NO: 6095 - DNA, 20 bp, Artificial Sequence
  Synthetic polynucleotide
ccgggaaggggcaggggaag

SEQ ID NO: 6096 - DNA, 20 bp, Artificial Sequence
  Synthetic polynucleotide
ggtcggcggccccggggcga

SEQ ID NO: 6097 - DNA, 20 bp, Artificial Sequence
  Synthetic polynucleotide
ttgggccaacagcaccagca

SEQ ID NO: 6098 - DNA, 20 bp, Artificial Sequence
  Synthetic polynucleotide
agctggggctgcgttgcagc

SEQ ID NO: 6099 - DNA, 20 bp, Artificial Sequence
  Synthetic polynucleotide
tagcacaagaggccttaaaa

SEQ ID NO: 6100 - DNA, 20 bp, Artificial Sequence
  Synthetic polynucleotide
ttggggccctgggggaagcc

SEQ ID NO: 6101 - DNA, 20 bp, Artificial Sequence
  Synthetic polynucleotide
ggggcagccgggcacgaagg

SEQ ID NO: 6102 - DNA, 20 bp, Artificial Sequence
  Synthetic polynucleotide
tggacatggggcaaccttct

SEQ ID NO: 6103 - DNA, 20 bp, Artificial Sequence
  Synthetic polynucleotide
tcggctggtgctgcctcggc

SEQ ID NO: 6104 - DNA, 20 bp, Artificial Sequence
  Synthetic polynucleotide
tagcggagggcgcggggcgc

SEQ ID NO: 6105 - DNA, 20 bp, Artificial Sequence
  Synthetic polynucleotide
ttgccgggttcgcctcccgg

SEQ ID NO: 6106 - DNA, 20 bp, Artificial Sequence
  Synthetic polynucleotide
agggctgggaggcaagggct

SEQ ID NO: 6107 - DNA, 20 bp, Artificial Sequence
  Synthetic polynucleotide
cgccggccgcacccccgcct

SEQ ID NO: 6108 - DNA, 20 bp, Artificial Sequence
  Synthetic polynucleotide
agggaggcccggatgctgaa

SEQ ID NO: 6109 - DNA, 20 bp, Artificial Sequence
  Synthetic polynucleotide
tgagcgagcgcaggcggcgc

SEQ ID NO: 6110 - DNA, 20 bp, Artificial Sequence
  Synthetic polynucleotide
gggcagtgctggcggcgtcc

SEQ ID NO: 6111 - DNA, 20 bp, Artificial Sequence
  Synthetic polynucleotide
cggcggggaggtgctcggcg

SEQ ID NO: 6112 - DNA, 20 bp, Artificial Sequence
  Synthetic polynucleotide
gggccctgggggaagcctgg

SEQ ID NO: 6113 - DNA, 20 bp, Artificial Sequence
  Synthetic polynucleotide
aggcgggtcgggggcgggcg

SEQ ID NO: 6114 - DNA, 20 bp, Artificial Sequence
  Synthetic polynucleotide
gggggccgcggcgcgggggc

SEQ ID NO: 6115 - DNA, 20 bp, Artificial Sequence
  Synthetic polynucleotide
gtagcggagggcgcggggcg

SEQ ID NO: 6116 - DNA, 20 bp, Artificial Sequence
  Synthetic polynucleotide
tggaaggccaggcaggtgga

SEQ ID NO: 6117 - DNA, 55 bp, Artificial Sequence
  Synthetic polynucleotide
ctccattcgtgtcgccgaccgcggcggcggcggcggcggcggcggcggcgcccaa

SEQ ID NO: 6118 - DNA, 55 bp, Artificial Sequence
  Synthetic polynucleotide
ctagtaccttgcgtagtactgaggaggaggaggaggaggaggaggaggcatccgg

SEQ ID NO: 6119 - DNA, 55 bp, Artificial Sequence
  Synthetic polynucleotide
gtagtcagcttgcctactcgggggcggggcggggcggggcggggccgcagactca

SEQ ID NO: 6120 - DNA, 55 bp, Artificial Sequence
  Synthetic polynucleotide
gcacgtaccctgagtccccgcggcgcggcgcggcgcggcgcggcaggagagtaag

SEQ ID NO: 6121 - DNA, 55 bp, Artificial Sequence
  Synthetic polynucleotide
cgcgcgcgcgcgcgcgcgcgcgcgcgcgcgtggatgaggccactagggagtctat

SEQ ID NO: 6122 - DNA, 55 bp, Artificial Sequence
  Synthetic polynucleotide
cagcagcagcagcagcagcagcagcagcagtggaccatcgatgcatgctcctaca

SEQ ID NO: 6123 - DNA, 55 bp, Artificial Sequence
  Synthetic polynucleotide
gaagaagaagaagaagaagaagaagaagaatgggtctttttcgttaataagtaac

SEQ ID NO: 6124 - DNA, 55 bp, Artificial Sequence
  Synthetic polynucleotide
ctagcgagcgagcgagcgagcgagcgagcgtggactcatcctccgcgttattgtg

SEQ ID NO: 6125 - DNA, 55 bp, Artificial Sequence
  Synthetic polynucleotide
caaatgggtagctaatttcgcgcgcgcgcgtggctatccacctggtgaaaactgt

SEQ ID NO: 6126 - DNA, 55 bp, Artificial Sequence
  Synthetic polynucleotide
tgttgccctttttcctttcagcagcagcagtggcatgtatgctgtcctggtttct

SEQ ID NO: 6127 - DNA, 55 bp, Artificial Sequence
  Synthetic polynucleotide
tcaacaacggggacctttgaagaagaagaatggcgatcttccctgtatgacgcgc

SEQ ID NO: 6128 - DNA, 55 bp, Artificial Sequence
  Synthetic polynucleotide
caacacgtactagtttttcggcggcggcggtggatttggcgaggaccatcatcaa

SEQ ID NO: 6129 - DNA, 55 bp, Artificial Sequence
  Synthetic polynucleotide
atgtgcagcctcgattttaggaggaggaggtggcgaactcatagtgggaaatgag

SEQ ID NO: 6130 - DNA, 55 bp, Artificial Sequence
  Synthetic polynucleotide
gcttacatctatacttttagcgagcgagcgtggccgtgcggacagagttaaataa

SEQ ID NO: 6131 - DNA, 55 bp, Artificial Sequence
  Synthetic polynucleotide
agcaaagtttcgcgttttttggggcggggctggtgtcaacagagcattttatcct

SEQ ID NO: 6132 - DNA, 55 bp, Artificial Sequence
  Synthetic polynucleotide
aacaagactaatcaatttttcgcggcgcggtggccgcaactacagcatcgccgcg

SEQ ID NO: 6133 - DNA, 55 bp, Artificial Sequence
  Synthetic polynucleotide
tagtttctagcacagcgctggtgtggcgtgtggctgaaggcatacgtaattctga

SEQ ID NO: 6134 - DNA, 55 bp, Artificial Sequence
  Synthetic polynucleotide
tacgactcccatgccgttgcgacggcccgacggcctactctcgcgccaataagcc

SEQ ID NO: 6135 - DNA, 55 bp, Artificial Sequence
  Synthetic polynucleotide
agaggaggctggattccagatggggttgatggggtttcagcgagtgggccgctgt

SEQ ID NO: 6136 - DNA, 55 bp, Artificial Sequence
  Synthetic polynucleotide
agcgctcatataacgatatggggggttatggggggttgaattgcttcagcacgat

SEQ ID NO: 6137 - DNA, 55 bp, Artificial Sequence
  Synthetic polynucleotide
gaaagttttacgccattaaggggtacctaaggggtaccgttacgcatacggagag

SEQ ID NO: 6138 - DNA, 55 bp, Artificial Sequence
  Synthetic polynucleotide
acaatacaatccgcgctgtggacggccctgtggacggcctcgaccccactactga

SEQ ID NO: 6139 - DNA, 55 bp, Artificial Sequence
  Synthetic polynucleotide
caagtgattggcctggttggggtgtacggttggggtgtacccatagcacctgtcg

SEQ ID NO: 6140 - DNA, 55 bp, Artificial Sequence
  Synthetic polynucleotide
cacgtgcgcagattacggggcaatgagtacggggcaatgagttagaccccaatga

SEQ ID NO: 6141 - DNA, 55 bp, Artificial Sequence
  Synthetic polynucleotide
ctttctccgaagtgcaggttacattcgtgcaggttacattcggcgtcctttaaga

SEQ ID NO: 6142 - DNA, 55 bp, Artificial Sequence
  Synthetic polynucleotide
cggagcccacttgtgggccagaccttttgtgggccagacctttatccgccagcga

SEQ ID NO: 6143 - DNA, 55 bp, Artificial Sequence
  Synthetic polynucleotide
gcgataaatatgacggctcatcctgtatgacggctcatcctgtatcaactgtccc

SEQ ID NO: 6144 - DNA, 55 bp, Artificial Sequence
  Synthetic polynucleotide
tattcatcttctcggctatatacggagtctcggctatatacggagcgtattctac

SEQ ID NO: 6145 - DNA, 55 bp, Artificial Sequence
  Synthetic polynucleotide
ttcgccgtcacgggaagcccgacataccacgggaagcccgacatactacgcaagc

SEQ ID NO: 6146 - DNA, 55 bp, Artificial Sequence
  Synthetic polynucleotide
ggagtagcactggacgttttttgcgggcactggacgttttttgcgggggctgcat

SEQ ID NO: 6147 - DNA, 55 bp, Artificial Sequence
  Synthetic polynucleotide
gtaggtcagagggcagaatcggtatgacagagggcagaatcggtatgaagaaggc

SEQ ID NO: 6148 - DNA, 55 bp, Artificial Sequence
  Synthetic polynucleotide
ttgggacaaggtcttcaaccaaagagtacaaggtcttcaaccaaagagtcgggtt

SEQ ID NO: 6149 - DNA, 55 bp, Artificial Sequence
  Synthetic polynucleotide
tacgtgccggaaggcagtatgatacgctgccggaaggcagtatgatacgcacagg

SEQ ID NO: 6150 - DNA, 55 bp, Artificial Sequence
  Synthetic polynucleotide
gccaatgggcaacccatcctggcctgaaatgggcaacccatcctggcctgacccc

SEQ ID NO: 6151 - DNA, 55 bp, Artificial Sequence
  Synthetic polynucleotide
catgaagggattcaaacgagttttttttgaagggattcaaacgagttttttttca

SEQ ID NO: 6152 - DNA, 55 bp, Artificial Sequence
  Synthetic polynucleotide
cctcatccgacctatatgtggagaggcgagaggccggcgagataattcccgtgag

SEQ ID NO: 6153 - DNA, 55 bp, Artificial Sequence
  Synthetic polynucleotide
gtccgtctcataacggacacgttggggcgttggggattcctgcgagccttcgcat

SEQ ID NO: 6154 - DNA, 55 bp, Artificial Sequence
  Synthetic polynucleotide
gagttcgtgtcagttccttatcgggactatcgggaccggtcctctcgtataggtc

SEQ ID NO: 6155 - DNA, 55 bp, Artificial Sequence
  Synthetic polynucleotide
cacccgcatcacccaggcctcggttggcctcggttggttctgctcgagacctttc

SEQ ID NO: 6156 - DNA, 55 bp, Artificial Sequence
  Synthetic polynucleotide
agcccgtaaaacagtcagaaggaagtaagaaggaagtaacgttgacaggcgtcta

SEQ ID NO: 6157 - DNA, 55 bp, Artificial Sequence
  Synthetic polynucleotide
gggactacattatgaataaggcgacttataaggcgacttgcgatcgagacatact

SEQ ID NO: 6158 - DNA, 55 bp, Artificial Sequence
  Synthetic polynucleotide
tgatctcttaggaagtgtgggctcaaagtgtgggctcaaagttccacgtgtaatc

SEQ ID NO: 6159 - DNA, 55 bp, Artificial Sequence
  Synthetic polynucleotide
aggtttggaacacgcgcgggccgtccggcgcgggccgtccgtgtgttccacagct

SEQ ID NO: 6160 - DNA, 55 bp, Artificial Sequence
  Synthetic polynucleotide
cgaacatgacacttgtggcgtagtgatttgtggcgtagtgatactaggttaattg

SEQ ID NO: 6161 - DNA, 55 bp, Artificial Sequence
  Synthetic polynucleotide
cgcacgtacacttgtggagagttaggcttgtggagagttaggctgggtagttctg

SEQ ID NO: 6162 - DNA, 55 bp, Artificial Sequence
  Synthetic polynucleotide
ggtccgcagtttcgggtactatggcggttcgggtactatggcggagacgaagttc

SEQ ID NO: 6163 - DNA, 55 bp, Artificial Sequence
  Synthetic polynucleotide
gggtcggaacccgggggctagggctatcccgggggctagggctattagcgaacct

SEQ ID NO: 6164 - DNA, 55 bp, Artificial Sequence
  Synthetic polynucleotide
cacacatgggtaggatcgtgcacgcgaggtaggatcgtgcacgcgaagttattcc

SEQ ID NO: 6165 - DNA, 55 bp, Artificial Sequence
  Synthetic polynucleotide
gttaactcgtgggtatctttagtacctcgtgggtatctttagtaccttcgcgtat

SEQ ID NO: 6166 - DNA, 55 bp, Artificial Sequence
  Synthetic polynucleotide
gagtcaaacgggccagaaaactccgggaacgggccagaaaactccggggcatggc

SEQ ID NO: 6167 - DNA, 55 bp, Artificial Sequence
  Synthetic polynucleotide
tataccgcgggagtaaatggactcctgcgcgggagtaaatggactcctgtcggtg

SEQ ID NO: 6168 - DNA, 55 bp, Artificial Sequence
  Synthetic polynucleotide
cgaggaagggattcgcacagtggtattgaagggattcgcacagtggtattgctac

SEQ ID NO: 6169 - DNA, 55 bp, Artificial Sequence
  Synthetic polynucleotide
gtctactggtctcggttagtgtaaaactactggtctcggttagtgtaaaactaga

SEQ ID NO: 6170 - DNA, 55 bp, Artificial Sequence
  Synthetic polynucleotide
gcagttggggaaactgaaccagccccgagttggggaaactgaaccagccccgagt

SEQ ID NO: 6171 - DNA, 55 bp, Artificial Sequence
  Synthetic polynucleotide
tattgagtagggaacgtgcctaagggttaagggtaaatatctatacaactgttcc

SEQ ID NO: 6172 - DNA, 55 bp, Artificial Sequence
  Synthetic polynucleotide
tagcaatagtcttagccggtgcgggcctgcgggcccctaatatgggagaacatag

SEQ ID NO: 6173 - DNA, 55 bp, Artificial Sequence
  Synthetic polynucleotide
ggacggtgattaagatgaactaggagaactaggagatccctagggccggtccttg

SEQ ID NO: 6174 - DNA, 55 bp, Artificial Sequence
  Synthetic polynucleotide
agtacggtgacgggcttttgagggcgtttgagggcgttctgtacccgtaatcggt

SEQ ID NO: 6175 - DNA, 55 bp, Artificial Sequence
  Synthetic polynucleotide
ggtctggaaacgctttccatgggacggccatgggacggttgcataccgtcaaact

SEQ ID NO: 6176 - DNA, 55 bp, Artificial Sequence
  Synthetic polynucleotide
cgacattgagccaacctcagggctgacctcagggctgaccgaatgaattatctgt

SEQ ID NO: 6177 - DNA, 55 bp, Artificial Sequence
  Synthetic polynucleotide
tgcataagtttttcttaaggcgtgcctttaaggcgtgcctttgtcggtcctggac

SEQ ID NO: 6178 - DNA, 55 bp, Artificial Sequence
  Synthetic polynucleotide
cgcatgtagtccctcaaggtatcggtatcaaggtatcggtaaattcccagcaaca

SEQ ID NO: 6179 - DNA, 55 bp, Artificial Sequence
  Synthetic polynucleotide
ttgaaggatttagccggggtcctagacgccggggtcctagacgaaagggccacgc

SEQ ID NO: 6180 - DNA, 55 bp, Artificial Sequence
  Synthetic polynucleotide
aactggggcatctctggaacgaagcctctctggaacgaagcctcccatacacggg

SEQ ID NO: 6181 - DNA, 55 bp, Artificial Sequence
  Synthetic polynucleotide
gcaccctgtgtccgggctagcctcagatccgggctagcctcagagacaaagaagg

SEQ ID NO: 6182 - DNA, 55 bp, Artificial Sequence
  Synthetic polynucleotide
tcatgctttctctgggactttattgagctctgggactttattgagcggtcagctc

SEQ ID NO: 6183 - DNA, 55 bp, Artificial Sequence
  Synthetic polynucleotide
gttttgaggtggggagtcgtttagcgcgtggggagtcgtttagcgcatgtcttta

SEQ ID NO: 6184 - DNA, 55 bp, Artificial Sequence
  Synthetic polynucleotide
ttaacttcggaggcgtgccagatagcccggaggcgtgccagatagcccgtaatgg

SEQ ID NO: 6185 - DNA, 55 bp, Artificial Sequence
  Synthetic polynucleotide
tgaccaagatgggcgttctgaaatggaagatgggcgttctgaaatggatatctat

SEQ ID NO: 6186 - DNA, 55 bp, Artificial Sequence
  Synthetic polynucleotide
gtcctgtatggaaatacgggcaagcgcgtatggaaatacgggcaagcgcacctgg

SEQ ID NO: 6187 - DNA, 55 bp, Artificial Sequence
  Synthetic polynucleotide
gtattgttggaggcgttgagtggttgttgttggaggcgttgagtggttgtgacca

SEQ ID NO: 6188 - DNA, 55 bp, Artificial Sequence
  Synthetic polynucleotide
gtagactggttacgtggctgcggaattgactggttacgtggctgcggaattttga

SEQ ID NO: 6189 - DNA, 55 bp, Artificial Sequence
  Synthetic polynucleotide
tgcaacggccgaacttcgcgtcaaaatcaacggccgaacttcgcgtcaaaattat

SEQ ID NO: 6190 - DNA, 55 bp, Artificial Sequence
  Synthetic polynucleotide
agtgcacgagtgacgggataatgtgaaaacaggtaattgataggcttccaactta

SEQ ID NO: 6191 - DNA, 55 bp, Artificial Sequence
  Synthetic polynucleotide
agtgcacgagtgacgggataatgtgcccccaggtaattgataggcttccaactta

SEQ ID NO: 6192 - DNA, 55 bp, Artificial Sequence
  Synthetic polynucleotide
agtgcacgagtgacgggataatgtgggggcaggtaattgataggcttccaactta

SEQ ID NO: 6193 - DNA, 55 bp, Artificial Sequence
  Synthetic polynucleotide
agtgcacgagtgacgggataatgtgttttcaggtaattgataggcttccaactta

SEQ ID NO: 6194 - DNA, 55 bp, Artificial Sequence
  Synthetic polynucleotide
agtgcacgagtgacgggataatgtgacaccaggtaattgataggcttccaactta

SEQ ID NO: 6195 - DNA, 55 bp, Artificial Sequence
  Synthetic polynucleotide
agtgcacgagtgacgggataatgtgagagcaggtaattgataggcttccaactta

SEQ ID NO: 6196 - DNA, 55 bp, Artificial Sequence
  Synthetic polynucleotide
agtgcacgagtgacgggataatgtgatatcaggtaattgataggcttccaactta

SEQ ID NO: 6197 - DNA, 55 bp, Artificial Sequence
  Synthetic polynucleotide
agtgcacgagtgacgggataatgtgcacacaggtaattgataggcttccaactta

SEQ ID NO: 6198 - DNA, 55 bp, Artificial Sequence
  Synthetic polynucleotide
agtgcacgagtgacgggataatgtgcgcgcaggtaattgataggcttccaactta

SEQ ID NO: 6199 - DNA, 55 bp, Artificial Sequence
  Synthetic polynucleotide
agtgcacgagtgacgggataatgtgctctcaggtaattgataggcttccaactta

SEQ ID NO: 6200 - DNA, 55 bp, Artificial Sequence
  Synthetic polynucleotide
agtgcacgagtgacgggataatgtggagacaggtaattgataggcttccaactta

SEQ ID NO: 6201 - DNA, 55 bp, Artificial Sequence
  Synthetic polynucleotide
agtgcacgagtgacgggataatgtggcgccaggtaattgataggcttccaactta

SEQ ID NO: 6202 - DNA, 55 bp, Artificial Sequence
  Synthetic polynucleotide
agtgcacgagtgacgggataatgtggtgtcaggtaattgataggcttccaactta

SEQ ID NO: 6203 - DNA, 55 bp, Artificial Sequence
  Synthetic polynucleotide
agtgcacgagtgacgggataatgtgtatacaggtaattgataggcttccaactta

SEQ ID NO: 6204 - DNA, 55 bp, Artificial Sequence
  Synthetic polynucleotide
agtgcacgagtgacgggataatgtgtctccaggtaattgataggcttccaactta

SEQ ID NO: 6205 - DNA, 55 bp, Artificial Sequence
  Synthetic polynucleotide
agtgcacgagtgacgggataatgtgtgtgcaggtaattgataggcttccaactta

SEQ ID NO: 6206 - DNA, 55 bp, Artificial Sequence
  Synthetic polynucleotide
agtgcacgagtgacgggataatgtgatagcaggtaattgataggcttccaactta

SEQ ID NO: 6207 - DNA, 55 bp, Artificial Sequence
  Synthetic polynucleotide
agtgcacgagtgacgggataatgtgacatcaggtaattgataggcttccaactta

SEQ ID NO: 6208 - DNA, 55 bp, Artificial Sequence
  Synthetic polynucleotide
agtgcacgagtgacgggataatgtgagatcaggtaattgataggcttccaactta

SEQ ID NO: 6209 - DNA, 55 bp, Artificial Sequence
  Synthetic polynucleotide
agtgcacgagtgacgggataatgtgagaccaggtaattgataggcttccaactta

SEQ ID NO: 6210 - DNA, 55 bp, Artificial Sequence
  Synthetic polynucleotide
agtgcacgagtgacgggataatgtgataccaggtaattgataggcttccaactta

SEQ ID NO: 6211 - DNA, 55 bp, Artificial Sequence
  Synthetic polynucleotide
agtgcacgagtgacgggataatgtgcgctcaggtaattgataggcttccaactta

SEQ ID NO: 6212 - DNA, 55 bp, Artificial Sequence
  Synthetic polynucleotide
agtgcacgagtgacgggataatgtgcacgcaggtaattgataggcttccaactta

SEQ ID NO: 6213 - DNA, 55 bp, Artificial Sequence
  Synthetic polynucleotide
agtgcacgagtgacgggataatgtgctcgcaggtaattgataggcttccaactta

SEQ ID NO: 6214 - DNA, 55 bp, Artificial Sequence
  Synthetic polynucleotide
agtgcacgagtgacgggataatgtgctcacaggtaattgataggcttccaactta

SEQ ID NO: 6215 - DNA, 55 bp, Artificial Sequence
  Synthetic polynucleotide
agtgcacgagtgacgggataatgtgcactcaggtaattgataggcttccaactta

SEQ ID NO: 6216 - DNA, 55 bp, Artificial Sequence
  Synthetic polynucleotide
agtgcacgagtgacgggataatgtggcgtcaggtaattgataggcttccaactta

SEQ ID NO: 6217 - DNA, 55 bp, Artificial Sequence
  Synthetic polynucleotide
agtgcacgagtgacgggataatgtggagccaggtaattgataggcttccaactta

SEQ ID NO: 6218 - DNA, 55 bp, Artificial Sequence
  Synthetic polynucleotide
agtgcacgagtgacgggataatgtggtgccaggtaattgataggcttccaactta

SEQ ID NO: 6219 - DNA, 55 bp, Artificial Sequence
  Synthetic polynucleotide
agtgcacgagtgacgggataatgtggagtcaggtaattgataggcttccaactta

SEQ ID NO: 6220 - DNA, 55 bp, Artificial Sequence
  Synthetic polynucleotide
agtgcacgagtgacgggataatgtggtgacaggtaattgataggcttccaactta

SEQ ID NO: 6221 - DNA, 55 bp, Artificial Sequence
  Synthetic polynucleotide
agtgcacgagtgacgggataatgtgtatccaggtaattgataggcttccaactta

SEQ ID NO: 6222 - DNA, 55 bp, Artificial Sequence
  Synthetic polynucleotide
agtgcacgagtgacgggataatgtgtctacaggtaattgataggcttccaactta

SEQ ID NO: 6223 - DNA, 55 bp, Artificial Sequence
  Synthetic polynucleotide
agtgcacgagtgacgggataatgtgtgtccaggtaattgataggcttccaactta

SEQ ID NO: 6224 - DNA, 55 bp, Artificial Sequence
  Synthetic polynucleotide
agtgcacgagtgacgggataatgtgtgtacaggtaattgataggcttccaactta

SEQ ID NO: 6225 - DNA, 55 bp, Artificial Sequence
  Synthetic polynucleotide
agtgcacgagtgacgggataatgtgtatgcaggtaattgataggcttccaactta

SEQ ID NO: 6226 - DNA, 55 bp, Artificial Sequence
  Synthetic polynucleotide
agtgcacgagtgacgggataatgtgtagacaggtaattgataggcttccaactta

SEQ ID NO: 6227 - DNA, 55 bp, Artificial Sequence
  Synthetic polynucleotide
agtgcacgagtgacgggataatgtgtacacaggtaattgataggcttccaactta

SEQ ID NO: 6228 - DNA, 55 bp, Artificial Sequence
  Synthetic polynucleotide
agtgcacgagtgacgggataatgtggacacaggtaattgataggcttccaactta

SEQ ID NO: 6229 - DNA, 55 bp, Artificial Sequence
  Synthetic polynucleotide
agtgcacgagtgacgggataatgtgcagacaggtaattgataggcttccaactta

SEQ ID NO: 6230 - DNA, 55 bp, Artificial Sequence
  Synthetic polynucleotide
agtgcacgagtgacgggataatgtggatacaggtaattgataggcttccaactta

SEQ ID NO: 6231 - DNA, 55 bp, Artificial Sequence
  Synthetic polynucleotide
agtgcacgagtgacgggataatgtgacgccaggtaattgataggcttccaactta

SEQ ID NO: 6232 - DNA, 55 bp, Artificial Sequence
  Synthetic polynucleotide
agtgcacgagtgacgggataatgtgtcaccaggtaattgataggcttccaactta

SEQ ID NO: 6233 - DNA, 55 bp, Artificial Sequence
  Synthetic polynucleotide
agtgcacgagtgacgggataatgtggcaccaggtaattgataggcttccaactta

SEQ ID NO: 6234 - DNA, 55 bp, Artificial Sequence
  Synthetic polynucleotide
agtgcacgagtgacgggataatgtggctccaggtaattgataggcttccaactta

SEQ ID NO: 6235 - DNA, 55 bp, Artificial Sequence
  Synthetic polynucleotide
agtgcacgagtgacgggataatgtgtcgccaggtaattgataggcttccaactta

SEQ ID NO: 6236 - DNA, 55 bp, Artificial Sequence
  Synthetic polynucleotide
agtgcacgagtgacgggataatgtgcgagcaggtaattgataggcttccaactta

SEQ ID NO: 6237 - DNA, 55 bp, Artificial Sequence
  Synthetic polynucleotide
agtgcacgagtgacgggataatgtgagcgcaggtaattgataggcttccaactta

SEQ ID NO: 6238 - DNA, 55 bp, Artificial Sequence
  Synthetic polynucleotide
agtgcacgagtgacgggataatgtgagtgcaggtaattgataggcttccaactta

SEQ ID NO: 6239 - DNA, 55 bp, Artificial Sequence
  Synthetic polynucleotide
agtgcacgagtgacgggataatgtgtgagcaggtaattgataggcttccaactta

SEQ ID NO: 6240 - DNA, 55 bp, Artificial Sequence
  Synthetic polynucleotide
agtgcacgagtgacgggataatgtgtgcgcaggtaattgataggcttccaactta

SEQ ID NO: 6241 - DNA, 55 bp, Artificial Sequence
  Synthetic polynucleotide
agtgcacgagtgacgggataatgtggtctcaggtaattgataggcttccaactta

SEQ ID NO: 6242 - DNA, 55 bp, Artificial Sequence
  Synthetic polynucleotide
agtgcacgagtgacgggataatgtgctatcaggtaattgataggcttccaactta

SEQ ID NO: 6243 - DNA, 55 bp, Artificial Sequence
  Synthetic polynucleotide
agtgcacgagtgacgggataatgtgatgtcaggtaattgataggcttccaactta

SEQ ID NO: 6244 - DNA, 55 bp, Artificial Sequence
  Synthetic polynucleotide
agtgcacgagtgacgggataatgtgctgtcaggtaattgataggcttccaactta

SEQ ID NO: 6245 - DNA, 55 bp, Artificial Sequence
  Synthetic polynucleotide
agtgcacgagtgacgggataatgtgatctcaggtaattgataggcttccaactta

SEQ ID NO: 6246 - DNA, 55 bp, Artificial Sequence
  Synthetic polynucleotide
agtgcacgagtgacgggataatgtgacgtcaggtaattgataggcttccaactta

SEQ ID NO: 6247 - DNA, 55 bp, Artificial Sequence
  Synthetic polynucleotide
agtgcacgagtgacgggataatgtgactacaggtaattgataggcttccaactta

SEQ ID NO: 6248 - DNA, 55 bp, Artificial Sequence
  Synthetic polynucleotide
agtgcacgagtgacgggataatgtgagtacaggtaattgataggcttccaactta

SEQ ID NO: 6249 - DNA, 55 bp, Artificial Sequence
  Synthetic polynucleotide
agtgcacgagtgacgggataatgtgactgcaggtaattgataggcttccaactta

SEQ ID NO: 6250 - DNA, 55 bp, Artificial Sequence
  Synthetic polynucleotide
agtgcacgagtgacgggataatgtgatcgcaggtaattgataggcttccaactta

SEQ ID NO: 6251 - DNA, 55 bp, Artificial Sequence
  Synthetic polynucleotide
agtgcacgagtgacgggataatgtgctgacaggtaattgataggcttccaactta

SEQ ID NO: 6252 - DNA, 55 bp, Artificial Sequence
  Synthetic polynucleotide
agtgcacgagtgacgggataatgtgcgtacaggtaattgataggcttccaactta

SEQ ID NO: 6253 - DNA, 55 bp, Artificial Sequence
  Synthetic polynucleotide
agtgcacgagtgacgggataatgtgcatgcaggtaattgataggcttccaactta

SEQ ID NO: 6254 - DNA, 55 bp, Artificial Sequence
  Synthetic polynucleotide
agtgcacgagtgacgggataatgtgctaccaggtaattgataggcttccaactta

SEQ ID NO: 6255 - DNA, 55 bp, Artificial Sequence
  Synthetic polynucleotide
agtgcacgagtgacgggataatgtgcgaccaggtaattgataggcttccaactta

SEQ ID NO: 6256 - DNA, 55 bp, Artificial Sequence
  Synthetic polynucleotide
agtgcacgagtgacgggataatgtggtaccaggtaattgataggcttccaactta

SEQ ID NO: 6257 - DNA, 55 bp, Artificial Sequence
  Synthetic polynucleotide
agtgcacgagtgacgggataatgtggatgcaggtaattgataggcttccaactta

SEQ ID NO: 6258 - DNA, 55 bp, Artificial Sequence
  Synthetic polynucleotide
agtgcacgagtgacgggataatgtggactcaggtaattgataggcttccaactta

SEQ ID NO: 6259 - DNA, 55 bp, Artificial Sequence
  Synthetic polynucleotide
agtgcacgagtgacgggataatgtggctacaggtaattgataggcttccaactta

SEQ ID NO: 6260 - DNA, 55 bp, Artificial Sequence
  Synthetic polynucleotide
agtgcacgagtgacgggataatgtggtcgcaggtaattgataggcttccaactta

SEQ ID NO: 6261 - DNA, 55 bp, Artificial Sequence
  Synthetic polynucleotide
agtgcacgagtgacgggataatgtgtagccaggtaattgataggcttccaactta

SEQ ID NO: 6262 - DNA, 55 bp, Artificial Sequence
  Synthetic polynucleotide
agtgcacgagtgacgggataatgtgtgaccaggtaattgataggcttccaactta

SEQ ID NO: 6263 - DNA, 55 bp, Artificial Sequence
  Synthetic polynucleotide
agtgcacgagtgacgggataatgtgtgcacaggtaattgataggcttccaactta

SEQ ID NO: 6264 - DNA, 55 bp, Artificial Sequence
  Synthetic polynucleotide
agtgcacgagtgacgggataatgtgtcgtcaggtaattgataggcttccaactta

SEQ ID NO: 6265 - DNA, 55 bp, Artificial Sequence
  Synthetic polynucleotide
agtgcacgagtgacgggataatgtgtcgacaggtaattgataggcttccaactta

SEQ ID NO: 6266 - DNA, 55 bp, Artificial Sequence
  Synthetic polynucleotide
ccgagacctacgcgaaccgaaatcgaaaaccggtgcgcaagcagggctggcgtcc

SEQ ID NO: 6267 - DNA, 55 bp, Artificial Sequence
  Synthetic polynucleotide
ccgagacctacgcgaaccgaaatcgccccccggtgcgcaagcagggctggcgtcc

SEQ ID NO: 6268 - DNA, 55 bp, Artificial Sequence
  Synthetic polynucleotide
ccgagacctacgcgaaccgaaatcgggggccggtgcgcaagcagggctggcgtcc

SEQ ID NO: 6269 - DNA, 55 bp, Artificial Sequence
  Synthetic polynucleotide
ccgagacctacgcgaaccgaaatcgttttccggtgcgcaagcagggctggcgtcc

SEQ ID NO: 6270 - DNA, 55 bp, Artificial Sequence
  Synthetic polynucleotide
ccgagacctacgcgaaccgaaatcgacacccggtgcgcaagcagggctggcgtcc

SEQ ID NO: 6271 - DNA, 55 bp, Artificial Sequence
  Synthetic polynucleotide
ccgagacctacgcgaaccgaaatcgagagccggtgcgcaagcagggctggcgtcc

SEQ ID NO: 6272 - DNA, 55 bp, Artificial Sequence
  Synthetic polynucleotide
ccgagacctacgcgaaccgaaatcgatatccggtgcgcaagcagggctggcgtcc

SEQ ID NO: 6273 - DNA, 55 bp, Artificial Sequence
  Synthetic polynucleotide
ccgagacctacgcgaaccgaaatcgcacaccggtgcgcaagcagggctggcgtcc

SEQ ID NO: 6274 - DNA, 55 bp, Artificial Sequence
  Synthetic polynucleotide
ccgagacctacgcgaaccgaaatcgcgcgccggtgcgcaagcagggctggcgtcc

SEQ ID NO: 6275 - DNA, 55 bp, Artificial Sequence
  Synthetic polynucleotide
ccgagacctacgcgaaccgaaatcgctctccggtgcgcaagcagggctggcgtcc

SEQ ID NO: 6276 - DNA, 55 bp, Artificial Sequence
  Synthetic polynucleotide
ccgagacctacgcgaaccgaaatcggagaccggtgcgcaagcagggctggcgtcc

SEQ ID NO: 6277 - DNA, 55 bp, Artificial Sequence
  Synthetic polynucleotide
ccgagacctacgcgaaccgaaatcggcgcccggtgcgcaagcagggctggcgtcc

SEQ ID NO: 6278 - DNA, 55 bp, Artificial Sequence
  Synthetic polynucleotide
ccgagacctacgcgaaccgaaatcggtgtccggtgcgcaagcagggctggcgtcc

SEQ ID NO: 6279 - DNA, 55 bp, Artificial Sequence
  Synthetic polynucleotide
ccgagacctacgcgaaccgaaatcgtataccggtgcgcaagcagggctggcgtcc

SEQ ID NO: 6280 - DNA, 55 bp, Artificial Sequence
  Synthetic polynucleotide
ccgagacctacgcgaaccgaaatcgtctcccggtgcgcaagcagggctggcgtcc

SEQ ID NO: 6281 - DNA, 55 bp, Artificial Sequence
  Synthetic polynucleotide
ccgagacctacgcgaaccgaaatcgtgtgccggtgcgcaagcagggctggcgtcc

SEQ ID NO: 6282 - DNA, 55 bp, Artificial Sequence
  Synthetic polynucleotide
ccgagacctacgcgaaccgaaatcgacatccggtgcgcaagcagggctggcgtcc

SEQ ID NO: 6283 - DNA, 55 bp, Artificial Sequence
  Synthetic polynucleotide
ccgagacctacgcgaaccgaaatcgatagccggtgcgcaagcagggctggcgtcc

SEQ ID NO: 6284 - DNA, 55 bp, Artificial Sequence
  Synthetic polynucleotide
ccgagacctacgcgaaccgaaatcgacagccggtgcgcaagcagggctggcgtcc

SEQ ID NO: 6285 - DNA, 55 bp, Artificial Sequence
  Synthetic polynucleotide
ccgagacctacgcgaaccgaaatcgatacccggtgcgcaagcagggctggcgtcc

SEQ ID NO: 6286 - DNA, 55 bp, Artificial Sequence
  Synthetic polynucleotide
ccgagacctacgcgaaccgaaatcgagatccggtgcgcaagcagggctggcgtcc

SEQ ID NO: 6287 - DNA, 55 bp, Artificial Sequence
  Synthetic polynucleotide
ccgagacctacgcgaaccgaaatcgcgctccggtgcgcaagcagggctggcgtcc

SEQ ID NO: 6288 - DNA, 55 bp, Artificial Sequence
  Synthetic polynucleotide
ccgagacctacgcgaaccgaaatcgcacgccggtgcgcaagcagggctggcgtcc

SEQ ID NO: 6289 - DNA, 55 bp, Artificial Sequence
  Synthetic polynucleotide
ccgagacctacgcgaaccgaaatcgctcaccggtgcgcaagcagggctggcgtcc

SEQ ID NO: 6290 - DNA, 55 bp, Artificial Sequence
  Synthetic polynucleotide
ccgagacctacgcgaaccgaaatcgcactccggtgcgcaagcagggctggcgtcc

SEQ ID NO: 6291 - DNA, 55 bp, Artificial Sequence
  Synthetic polynucleotide
ccgagacctacgcgaaccgaaatcgcgcaccggtgcgcaagcagggctggcgtcc

SEQ ID NO: 6292 - DNA, 55 bp, Artificial Sequence
  Synthetic polynucleotide
ccgagacctacgcgaaccgaaatcggtgcccggtgcgcaagcagggctggcgtcc

SEQ ID NO: 6293 - DNA, 55 bp, Artificial Sequence
  Synthetic polynucleotide
ccgagacctacgcgaaccgaaatcggtgaccggtgcgcaagcagggctggcgtcc

SEQ ID NO: 6294 - DNA, 55 bp, Artificial Sequence
  Synthetic polynucleotide
ccgagacctacgcgaaccgaaatcggcgaccggtgcgcaagcagggctggcgtcc

SEQ ID NO: 6295 - DNA, 55 bp, Artificial Sequence
  Synthetic polynucleotide
ccgagacctacgcgaaccgaaatcggcgtccggtgcgcaagcagggctggcgtcc

SEQ ID NO: 6296 - DNA, 55 bp, Artificial Sequence
  Synthetic polynucleotide
ccgagacctacgcgaaccgaaatcggagcccggtgcgcaagcagggctggcgtcc

SEQ ID NO: 6297 - DNA, 55 bp, Artificial Sequence
  Synthetic polynucleotide
ccgagacctacgcgaaccgaaatcgtgtaccggtgcgcaagcagggctggcgtcc

SEQ ID NO: 6298 - DNA, 55 bp, Artificial Sequence
  Synthetic polynucleotide
ccgagacctacgcgaaccgaaatcgtatgccggtgcgcaagcagggctggcgtcc

SEQ ID NO: 6299 - DNA, 55 bp, Artificial Sequence
  Synthetic polynucleotide
ccgagacctacgcgaaccgaaatcgtatcccggtgcgcaagcagggctggcgtcc

SEQ ID NO: 6300 - DNA, 55 bp, Artificial Sequence
  Synthetic polynucleotide
ccgagacctacgcgaaccgaaatcgtctaccggtgcgcaagcagggctggcgtcc

SEQ ID NO: 6301 - DNA, 55 bp, Artificial Sequence
  Synthetic polynucleotide
ccgagacctacgcgaaccgaaatcgtgtcccggtgcgcaagcagggctggcgtcc

SEQ ID NO: 6302 - DNA, 55 bp, Artificial Sequence
  Synthetic polynucleotide
ccgagacctacgcgaaccgaaatcgtagaccggtgcgcaagcagggctggcgtcc

SEQ ID NO: 6303 - DNA, 55 bp, Artificial Sequence
  Synthetic polynucleotide
ccgagacctacgcgaaccgaaatcggataccggtgcgcaagcagggctggcgtcc

SEQ ID NO: 6304 - DNA, 55 bp, Artificial Sequence
  Synthetic polynucleotide
ccgagacctacgcgaaccgaaatcgcagaccggtgcgcaagcagggctggcgtcc

SEQ ID NO: 6305 - DNA, 55 bp, Artificial Sequence
  Synthetic polynucleotide
ccgagacctacgcgaaccgaaatcggacaccggtgcgcaagcagggctggcgtcc

SEQ ID NO: 6306 - DNA, 55 bp, Artificial Sequence
  Synthetic polynucleotide
ccgagacctacgcgaaccgaaatcgtacaccggtgcgcaagcagggctggcgtcc

SEQ ID NO: 6307 - DNA, 55 bp, Artificial Sequence
  Synthetic polynucleotide
ccgagacctacgcgaaccgaaatcggcacccggtgcgcaagcagggctggcgtcc

SEQ ID NO: 6308 - DNA, 55 bp, Artificial Sequence
  Synthetic polynucleotide
ccgagacctacgcgaaccgaaatcgtcacccggtgcgcaagcagggctggcgtcc

SEQ ID NO: 6309 - DNA, 55 bp, Artificial Sequence
  Synthetic polynucleotide
ccgagacctacgcgaaccgaaatcgactcccggtgcgcaagcagggctggcgtcc

SEQ ID NO: 6310 - DNA, 55 bp, Artificial Sequence
  Synthetic polynucleotide
ccgagacctacgcgaaccgaaatcggctcccggtgcgcaagcagggctggcgtcc

SEQ ID NO: 6311 - DNA, 55 bp, Artificial Sequence
  Synthetic polynucleotide
ccgagacctacgcgaaccgaaatcgtcgcccggtgcgcaagcagggctggcgtcc

SEQ ID NO: 6312 - DNA, 55 bp, Artificial Sequence
  Synthetic polynucleotide
ccgagacctacgcgaaccgaaatcgtgagccggtgcgcaagcagggctggcgtcc

SEQ ID NO: 6313 - DNA, 55 bp, Artificial Sequence
  Synthetic polynucleotide
ccgagacctacgcgaaccgaaatcgagtgccggtgcgcaagcagggctggcgtcc

SEQ ID NO: 6314 - DNA, 55 bp, Artificial Sequence
  Synthetic polynucleotide
ccgagacctacgcgaaccgaaatcgtgcgccggtgcgcaagcagggctggcgtcc

SEQ ID NO: 6315 - DNA, 55 bp, Artificial Sequence
  Synthetic polynucleotide
ccgagacctacgcgaaccgaaatcgagcgccggtgcgcaagcagggctggcgtcc

SEQ ID NO: 6316 - DNA, 55 bp, Artificial Sequence
  Synthetic polynucleotide
ccgagacctacgcgaaccgaaatcgcgtgccggtgcgcaagcagggctggcgtcc

SEQ ID NO: 6317 - DNA, 55 bp, Artificial Sequence
  Synthetic polynucleotide
ccgagacctacgcgaaccgaaatcgctgtccggtgcgcaagcagggctggcgtcc

SEQ ID NO: 6318 - DNA, 55 bp, Artificial Sequence
  Synthetic polynucleotide
ccgagacctacgcgaaccgaaatcggtatccggtgcgcaagcagggctggcgtcc

SEQ ID NO: 6319 - DNA, 55 bp, Artificial Sequence
  Synthetic polynucleotide
ccgagacctacgcgaaccgaaatcgatctccggtgcgcaagcagggctggcgtcc

SEQ ID NO: 6320 - DNA, 55 bp, Artificial Sequence
  Synthetic polynucleotide
ccgagacctacgcgaaccgaaatcggtctccggtgcgcaagcagggctggcgtcc

SEQ ID NO: 6321 - DNA, 55 bp, Artificial Sequence
  Synthetic polynucleotide
ccgagacctacgcgaaccgaaatcgatgtccggtgcgcaagcagggctggcgtcc

SEQ ID NO: 6322 - DNA, 55 bp, Artificial Sequence
  Synthetic polynucleotide
ccgagacctacgcgaaccgaaatcgagtcccggtgcgcaagcagggctggcgtcc

SEQ ID NO: 6323 - DNA, 55 bp, Artificial Sequence
  Synthetic polynucleotide
ccgagacctacgcgaaccgaaatcgatgcccggtgcgcaagcagggctggcgtcc

SEQ ID NO: 6324 - DNA, 55 bp, Artificial Sequence
  Synthetic polynucleotide
ccgagacctacgcgaaccgaaatcgatcgccggtgcgcaagcagggctggcgtcc

SEQ ID NO: 6325 - DNA, 55 bp, Artificial Sequence
  Synthetic polynucleotide
ccgagacctacgcgaaccgaaatcgagtaccggtgcgcaagcagggctggcgtcc

SEQ ID NO: 6326 - DNA, 55 bp, Artificial Sequence
  Synthetic polynucleotide
ccgagacctacgcgaaccgaaatcgactaccggtgcgcaagcagggctggcgtcc

SEQ ID NO: 6327 - DNA, 55 bp, Artificial Sequence
  Synthetic polynucleotide
ccgagacctacgcgaaccgaaatcgcatcccggtgcgcaagcagggctggcgtcc

SEQ ID NO: 6328 - DNA, 55 bp, Artificial Sequence
  Synthetic polynucleotide
ccgagacctacgcgaaccgaaatcgctagccggtgcgcaagcagggctggcgtcc

SEQ ID NO: 6329 - DNA, 55 bp, Artificial Sequence
  Synthetic polynucleotide
ccgagacctacgcgaaccgaaatcgcgatccggtgcgcaagcagggctggcgtcc

SEQ ID NO: 6330 - DNA, 55 bp, Artificial Sequence
  Synthetic polynucleotide
ccgagacctacgcgaaccgaaatcgcgtcccggtgcgcaagcagggctggcgtcc

SEQ ID NO: 6331 - DNA, 55 bp, Artificial Sequence
  Synthetic polynucleotide
ccgagacctacgcgaaccgaaatcgctacccggtgcgcaagcagggctggcgtcc

SEQ ID NO: 6332 - DNA, 55 bp, Artificial Sequence
  Synthetic polynucleotide
ccgagacctacgcgaaccgaaatcggactccggtgcgcaagcagggctggcgtcc

SEQ ID NO: 6333 - DNA, 55 bp, Artificial Sequence
  Synthetic polynucleotide
ccgagacctacgcgaaccgaaatcggatcccggtgcgcaagcagggctggcgtcc

SEQ ID NO: 6334 - DNA, 55 bp, Artificial Sequence
  Synthetic polynucleotide
ccgagacctacgcgaaccgaaatcggatgccggtgcgcaagcagggctggcgtcc

SEQ ID NO: 6335 - DNA, 55 bp, Artificial Sequence
  Synthetic polynucleotide
ccgagacctacgcgaaccgaaatcggtagccggtgcgcaagcagggctggcgtcc

SEQ ID NO: 6336 - DNA, 55 bp, Artificial Sequence
  Synthetic polynucleotide
ccgagacctacgcgaaccgaaatcggcatccggtgcgcaagcagggctggcgtcc

SEQ ID NO: 6337 - DNA, 55 bp, Artificial Sequence
  Synthetic polynucleotide
ccgagacctacgcgaaccgaaatcgtacgccggtgcgcaagcagggctggcgtcc

SEQ ID NO: 6338 - DNA, 55 bp, Artificial Sequence
  Synthetic polynucleotide
ccgagacctacgcgaaccgaaatcgtgctccggtgcgcaagcagggctggcgtcc

SEQ ID NO: 6339 - DNA, 55 bp, Artificial Sequence
  Synthetic polynucleotide
ccgagacctacgcgaaccgaaatcgtgcaccggtgcgcaagcagggctggcgtcc

SEQ ID NO: 6340 - DNA, 55 bp, Artificial Sequence
  Synthetic polynucleotide
ccgagacctacgcgaaccgaaatcgtcgtccggtgcgcaagcagggctggcgtcc

SEQ ID NO: 6341 - DNA, 55 bp, Artificial Sequence
  Synthetic polynucleotide
ccgagacctacgcgaaccgaaatcgtagcccggtgcgcaagcagggctggcgtcc

SEQ ID NO: 6342 - DNA, 55 bp, Artificial Sequence
  Synthetic polynucleotide
gcccccacaaagcggaccagccagcaaaatagggaataaggccaacttgcacccc

SEQ ID NO: 6343 - DNA, 55 bp, Artificial Sequence
  Synthetic polynucleotide
gcccccacaaagcggaccagccagccccctagggaataaggccaacttgcacccc

SEQ ID NO: 6344 - DNA, 55 bp, Artificial Sequence
  Synthetic polynucleotide
gcccccacaaagcggaccagccagcggggtagggaataaggccaacttgcacccc

SEQ ID NO: 6345 - DNA, 55 bp, Artificial Sequence
  Synthetic polynucleotide
gcccccacaaagcggaccagccagctttttagggaataaggccaacttgcacccc

SEQ ID NO: 6346 - DNA, 55 bp, Artificial Sequence
  Synthetic polynucleotide
gcccccacaaagcggaccagccagcacactagggaataaggccaacttgcacccc

SEQ ID NO: 6347 - DNA, 55 bp, Artificial Sequence
  Synthetic polynucleotide
gcccccacaaagcggaccagccagcagagtagggaataaggccaacttgcacccc

SEQ ID NO: 6348 - DNA, 55 bp, Artificial Sequence
  Synthetic polynucleotide
gcccccacaaagcggaccagccagcatattagggaataaggccaacttgcacccc

SEQ ID NO: 6349 - DNA, 55 bp, Artificial Sequence
  Synthetic polynucleotide
gcccccacaaagcggaccagccagccacatagggaataaggccaacttgcacccc

SEQ ID NO: 6350 - DNA, 55 bp, Artificial Sequence
  Synthetic polynucleotide
gcccccacaaagcggaccagccagccgcgtagggaataaggccaacttgcacccc

SEQ ID NO: 6351 - DNA, 55 bp, Artificial Sequence
  Synthetic polynucleotide
gcccccacaaagcggaccagccagcctcttagggaataaggccaacttgcacccc

SEQ ID NO: 6352 - DNA, 55 bp, Artificial Sequence
  Synthetic polynucleotide
gcccccacaaagcggaccagccagcgagatagggaataaggccaacttgcacccc

SEQ ID NO: 6353 - DNA, 55 bp, Artificial Sequence
  Synthetic polynucleotide
gcccccacaaagcggaccagccagcgcgctagggaataaggccaacttgcacccc

SEQ ID NO: 6354 - DNA, 55 bp, Artificial Sequence
  Synthetic polynucleotide
gcccccacaaagcggaccagccagcgtgttagggaataaggccaacttgcacccc

SEQ ID NO: 6355 - DNA, 55 bp, Artificial Sequence
  Synthetic polynucleotide
gcccccacaaagcggaccagccagctatatagggaataaggccaacttgcacccc

SEQ ID NO: 6356 - DNA, 55 bp, Artificial Sequence
  Synthetic polynucleotide
gcccccacaaagcggaccagccagctctctagggaataaggccaacttgcacccc

SEQ ID NO: 6357 - DNA, 55 bp, Artificial Sequence
  Synthetic polynucleotide
gcccccacaaagcggaccagccagctgtgtagggaataaggccaacttgcacccc

SEQ ID NO: 6358 - DNA, 55 bp, Artificial Sequence
  Synthetic polynucleotide
gcccccacaaagcggaccagccagcagactagggaataaggccaacttgcacccc

SEQ ID NO: 6359 - DNA, 55 bp, Artificial Sequence
  Synthetic polynucleotide
gcccccacaaagcggaccagccagcatagtagggaataaggccaacttgcacccc

SEQ ID NO: 6360 - DNA, 55 bp, Artificial Sequence
  Synthetic polynucleotide
gcccccacaaagcggaccagccagcacagtagggaataaggccaacttgcacccc

SEQ ID NO: 6361 - DNA, 55 bp, Artificial Sequence
  Synthetic polynucleotide
gcccccacaaagcggaccagccagcagattagggaataaggccaacttgcacccc

SEQ ID NO: 6362 - DNA, 55 bp, Artificial Sequence
  Synthetic polynucleotide
gcccccacaaagcggaccagccagcatactagggaataaggccaacttgcacccc

SEQ ID NO: 6363 - DNA, 55 bp, Artificial Sequence
  Synthetic polynucleotide
gcccccacaaagcggaccagccagccgcttagggaataaggccaacttgcacccc

SEQ ID NO: 6364 - DNA, 55 bp, Artificial Sequence
  Synthetic polynucleotide
gcccccacaaagcggaccagccagcctcgtagggaataaggccaacttgcacccc

SEQ ID NO: 6365 - DNA, 55 bp, Artificial Sequence
  Synthetic polynucleotide
gcccccacaaagcggaccagccagccacgtagggaataaggccaacttgcacccc

SEQ ID NO: 6366 - DNA, 55 bp, Artificial Sequence
  Synthetic polynucleotide
gcccccacaaagcggaccagccagccgcatagggaataaggccaacttgcacccc

SEQ ID NO: 6367 - DNA, 55 bp, Artificial Sequence
  Synthetic polynucleotide
gcccccacaaagcggaccagccagcctcatagggaataaggccaacttgcacccc

SEQ ID NO: 6368 - DNA, 55 bp, Artificial Sequence
  Synthetic polynucleotide
gcccccacaaagcggaccagccagcgagttagggaataaggccaacttgcacccc

SEQ ID NO: 6369 - DNA, 55 bp, Artificial Sequence
  Synthetic polynucleotide
gcccccacaaagcggaccagccagcgagctagggaataaggccaacttgcacccc

SEQ ID NO: 6370 - DNA, 55 bp, Artificial Sequence
  Synthetic polynucleotide
gcccccacaaagcggaccagccagcgcgatagggaataaggccaacttgcacccc

SEQ ID NO: 6371 - DNA, 55 bp, Artificial Sequence
  Synthetic polynucleotide
gcccccacaaagcggaccagccagcgtgatagggaataaggccaacttgcacccc

SEQ ID NO: 6372 - DNA, 55 bp, Artificial Sequence
  Synthetic polynucleotide
gcccccacaaagcggaccagccagcgtgctagggaataaggccaacttgcacccc

SEQ ID NO: 6373 - DNA, 55 bp, Artificial Sequence
  Synthetic polynucleotide
gcccccacaaagcggaccagccagctctgtagggaataaggccaacttgcacccc

SEQ ID NO: 6374 - DNA, 55 bp, Artificial Sequence
  Synthetic polynucleotide
gcccccacaaagcggaccagccagctatctagggaataaggccaacttgcacccc

SEQ ID NO: 6375 - DNA, 55 bp, Artificial Sequence
  Synthetic polynucleotide
gcccccacaaagcggaccagccagctctatagggaataaggccaacttgcacccc

SEQ ID NO: 6376 - DNA, 55 bp, Artificial Sequence
  Synthetic polynucleotide
gcccccacaaagcggaccagccagctgtctagggaataaggccaacttgcacccc

SEQ ID NO: 6377 - DNA, 55 bp, Artificial Sequence
  Synthetic polynucleotide
gcccccacaaagcggaccagccagctgtatagggaataaggccaacttgcacccc

SEQ ID NO: 6378 - DNA, 55 bp, Artificial Sequence
  Synthetic polynucleotide
gcccccacaaagcggaccagccagctacatagggaataaggccaacttgcacccc

SEQ ID NO: 6379 - DNA, 55 bp, Artificial Sequence
  Synthetic polynucleotide
gcccccacaaagcggaccagccagcgacatagggaataaggccaacttgcacccc

SEQ ID NO: 6380 - DNA, 55 bp, Artificial Sequence
  Synthetic polynucleotide
gcccccacaaagcggaccagccagctagatagggaataaggccaacttgcacccc

SEQ ID NO: 6381 - DNA, 55 bp, Artificial Sequence
  Synthetic polynucleotide
gcccccacaaagcggaccagccagccatatagggaataaggccaacttgcacccc

SEQ ID NO: 6382 - DNA, 55 bp, Artificial Sequence
  Synthetic polynucleotide
gcccccacaaagcggaccagccagcgatatagggaataaggccaacttgcacccc

SEQ ID NO: 6383 - DNA, 55 bp, Artificial Sequence
  Synthetic polynucleotide
gcccccacaaagcggaccagccagcactctagggaataaggccaacttgcacccc

SEQ ID NO: 6384 - DNA, 55 bp, Artificial Sequence
  Synthetic polynucleotide
gcccccacaaagcggaccagccagcgcactagggaataaggccaacttgcacccc

SEQ ID NO: 6385 - DNA, 55 bp, Artificial Sequence
  Synthetic polynucleotide
gcccccacaaagcggaccagccagctcgctagggaataaggccaacttgcacccc

SEQ ID NO: 6386 - DNA, 55 bp, Artificial Sequence
  Synthetic polynucleotide
gcccccacaaagcggaccagccagcacgctagggaataaggccaacttgcacccc

SEQ ID NO: 6387 - DNA, 55 bp, Artificial Sequence
  Synthetic polynucleotide
gcccccacaaagcggaccagccagcgctctagggaataaggccaacttgcacccc

SEQ ID NO: 6388 - DNA, 55 bp, Artificial Sequence
  Synthetic polynucleotide
gcccccacaaagcggaccagccagcagcgtagggaataaggccaacttgcacccc

SEQ ID NO: 6389 - DNA, 55 bp, Artificial Sequence
  Synthetic polynucleotide
gcccccacaaagcggaccagccagccgagtagggaataaggccaacttgcacccc

SEQ ID NO: 6390 - DNA, 55 bp, Artificial Sequence
  Synthetic polynucleotide
gcccccacaaagcggaccagccagctgcgtagggaataaggccaacttgcacccc

SEQ ID NO: 6391 - DNA, 55 bp, Artificial Sequence
  Synthetic polynucleotide
gcccccacaaagcggaccagccagctgagtagggaataaggccaacttgcacccc

SEQ ID NO: 6392 - DNA, 55 bp, Artificial Sequence
  Synthetic polynucleotide
gcccccacaaagcggaccagccagcagtgtagggaataaggccaacttgcacccc

SEQ ID NO: 6393 - DNA, 55 bp, Artificial Sequence
  Synthetic polynucleotide
gcccccacaaagcggaccagccagcatgttagggaataaggccaacttgcacccc

SEQ ID NO: 6394 - DNA, 55 bp, Artificial Sequence
  Synthetic polynucleotide
gcccccacaaagcggaccagccagcgtattagggaataaggccaacttgcacccc

SEQ ID NO: 6395 - DNA, 55 bp, Artificial Sequence
  Synthetic polynucleotide
gcccccacaaagcggaccagccagcctattagggaataaggccaacttgcacccc

SEQ ID NO: 6396 - DNA, 55 bp, Artificial Sequence
  Synthetic polynucleotide
gcccccacaaagcggaccagccagcctgttagggaataaggccaacttgcacccc

SEQ ID NO: 6397 - DNA, 55 bp, Artificial Sequence
  Synthetic polynucleotide
gcccccacaaagcggaccagccagcgtcttagggaataaggccaacttgcacccc

SEQ ID NO: 6398 - DNA, 55 bp, Artificial Sequence
  Synthetic polynucleotide
gcccccacaaagcggaccagccagcactatagggaataaggccaacttgcacccc

SEQ ID NO: 6399 - DNA, 55 bp, Artificial Sequence
  Synthetic polynucleotide
gcccccacaaagcggaccagccagcactgtagggaataaggccaacttgcacccc

SEQ ID NO: 6400 - DNA, 55 bp, Artificial Sequence
  Synthetic polynucleotide
gcccccacaaagcggaccagccagcatcatagggaataaggccaacttgcacccc

SEQ ID NO: 6401 - DNA, 55 bp, Artificial Sequence
  Synthetic polynucleotide
gcccccacaaagcggaccagccagcagcttagggaataaggccaacttgcacccc

SEQ ID NO: 6402 - DNA, 55 bp, Artificial Sequence
  Synthetic polynucleotide
gcccccacaaagcggaccagccagcagtctagggaataaggccaacttgcacccc

SEQ ID NO: 6403 - DNA, 55 bp, Artificial Sequence
  Synthetic polynucleotide
gcccccacaaagcggaccagccagccatctagggaataaggccaacttgcacccc

SEQ ID NO: 6404 - DNA, 55 bp, Artificial Sequence
  Synthetic polynucleotide
gcccccacaaagcggaccagccagccgactagggaataaggccaacttgcacccc

SEQ ID NO: 6405 - DNA, 55 bp, Artificial Sequence
  Synthetic polynucleotide
gcccccacaaagcggaccagccagcctagtagggaataaggccaacttgcacccc

SEQ ID NO: 6406 - DNA, 55 bp, Artificial Sequence
  Synthetic polynucleotide
gcccccacaaagcggaccagccagcctgatagggaataaggccaacttgcacccc

SEQ ID NO: 6407 - DNA, 55 bp, Artificial Sequence
  Synthetic polynucleotide
gcccccacaaagcggaccagccagccagttagggaataaggccaacttgcacccc

SEQ ID NO: 6408 - DNA, 55 bp, Artificial Sequence
  Synthetic polynucleotide
gcccccacaaagcggaccagccagcgtcgtagggaataaggccaacttgcacccc

SEQ ID NO: 6409 - DNA, 55 bp, Artificial Sequence
  Synthetic polynucleotide
gcccccacaaagcggaccagccagcgctgtagggaataaggccaacttgcacccc

SEQ ID NO: 6410 - DNA, 55 bp, Artificial Sequence
  Synthetic polynucleotide
gcccccacaaagcggaccagccagcgcattagggaataaggccaacttgcacccc

SEQ ID NO: 6411 - DNA, 55 bp, Artificial Sequence
  Synthetic polynucleotide
gcccccacaaagcggaccagccagcgctatagggaataaggccaacttgcacccc

SEQ ID NO: 6412 - DNA, 55 bp, Artificial Sequence
  Synthetic polynucleotide
gcccccacaaagcggaccagccagcgacttagggaataaggccaacttgcacccc

SEQ ID NO: 6413 - DNA, 55 bp, Artificial Sequence
  Synthetic polynucleotide
gcccccacaaagcggaccagccagctacgtagggaataaggccaacttgcacccc

SEQ ID NO: 6414 - DNA, 55 bp, Artificial Sequence
  Synthetic polynucleotide
gcccccacaaagcggaccagccagctagttagggaataaggccaacttgcacccc

SEQ ID NO: 6415 - DNA, 55 bp, Artificial Sequence
  Synthetic polynucleotide
gcccccacaaagcggaccagccagctcagtagggaataaggccaacttgcacccc

SEQ ID NO: 6416 - DNA, 55 bp, Artificial Sequence
  Synthetic polynucleotide
gcccccacaaagcggaccagccagctgactagggaataaggccaacttgcacccc

SEQ ID NO: 6417 - DNA, 55 bp, Artificial Sequence
  Synthetic polynucleotide
gcccccacaaagcggaccagccagctagctagggaataaggccaacttgcacccc

SEQ ID NO: 6418 - DNA, 55 bp, Artificial Sequence; identical to SEQ ID NO: 3989
  Synthetic polynucleotide

SEQ ID NO: 6419 - DNA, 55 bp, Artificial Sequence; identical to SEQ ID NO: 3990
  Synthetic polynucleotide

SEQ ID NO: 6420 - DNA, 55 bp, Artificial Sequence; identical to SEQ ID NO: 3991
  Synthetic polynucleotide

SEQ ID NO: 6421 - DNA, 55 bp, Artificial Sequence; identical to SEQ ID NO: 3992
  Synthetic polynucleotide

SEQ ID NO: 6422 - DNA, 55 bp, Artificial Sequence; identical to SEQ ID NO: 3993
  Synthetic polynucleotide

SEQ ID NO: 6423 - DNA, 55 bp, Artificial Sequence; identical to SEQ ID NO: 3994
  Synthetic polynucleotide

SEQ ID NO: 6424 - DNA, 55 bp, Artificial Sequence; identical to SEQ ID NO: 3995
  Synthetic polynucleotide

SEQ ID NO: 6425 - DNA, 55 bp, Artificial Sequence; identical to SEQ ID NO: 3996
  Synthetic polynucleotide

SEQ ID NO: 6426 - DNA, 55 bp, Artificial Sequence; identical to SEQ ID NO: 3997
  Synthetic polynucleotide

SEQ ID NO: 6427 - DNA, 55 bp, Artificial Sequence; identical to SEQ ID NO: 3998
  Synthetic polynucleotide

SEQ ID NO: 6428 - DNA, 55 bp, Artificial Sequence; identical to SEQ ID NO: 3999
  Synthetic polynucleotide

SEQ ID NO: 6429 - DNA, 55 bp, Artificial Sequence; identical to SEQ ID NO: 4000
  Synthetic polynucleotide

SEQ ID NO: 6430 - DNA, 55 bp, Artificial Sequence; identical to SEQ ID NO: 4001
  Synthetic polynucleotide

SEQ ID NO: 6431 - DNA, 55 bp, Artificial Sequence; identical to SEQ ID NO: 4002
  Synthetic polynucleotide

SEQ ID NO: 6432 - DNA, 55 bp, Artificial Sequence; identical to SEQ ID NO: 4003
  Synthetic polynucleotide

SEQ ID NO: 6433 - DNA, 55 bp, Artificial Sequence; identical to SEQ ID NO: 4004
  Synthetic polynucleotide

SEQ ID NO: 6434 - DNA, 55 bp, Artificial Sequence; identical to SEQ ID NO: 4005
  Synthetic polynucleotide

SEQ ID NO: 6435 - DNA, 55 bp, Artificial Sequence; identical to SEQ ID NO: 4006
  Synthetic polynucleotide

SEQ ID NO: 6436 - DNA, 55 bp, Artificial Sequence; identical to SEQ ID NO: 4007
  Synthetic polynucleotide

SEQ ID NO: 6437 - DNA, 55 bp, Artificial Sequence; identical to SEQ ID NO: 4008
  Synthetic polynucleotide

SEQ ID NO: 6438 - DNA, 55 bp, Artificial Sequence; identical to SEQ ID NO: 4009
  Synthetic polynucleotide

SEQ ID NO: 6439 - DNA, 55 bp, Artificial Sequence; identical to SEQ ID NO: 4010
  Synthetic polynucleotide

SEQ ID NO: 6440 - DNA, 55 bp, Artificial Sequence; identical to SEQ ID NO: 4011
  Synthetic polynucleotide

SEQ ID NO: 6441 - DNA, 55 bp, Artificial Sequence; identical to SEQ ID NO: 4012
  Synthetic polynucleotide

SEQ ID NO: 6442 - DNA, 55 bp, Artificial Sequence; identical to SEQ ID NO: 4013
  Synthetic polynucleotide

SEQ ID NO: 6443 - DNA, 55 bp, Artificial Sequence; identical to SEQ ID NO: 4014
  Synthetic polynucleotide

SEQ ID NO: 6444 - DNA, 55 bp, Artificial Sequence; identical to SEQ ID NO: 4015
  Synthetic polynucleotide

SEQ ID NO: 6445 - DNA, 55 bp, Artificial Sequence; identical to SEQ ID NO: 4016
  Synthetic polynucleotide

SEQ ID NO: 6446 - DNA, 55 bp, Artificial Sequence; identical to SEQ ID NO: 4017
  Synthetic polynucleotide

SEQ ID NO: 6447 - DNA, 55 bp, Artificial Sequence; identical to SEQ ID NO: 4018
  Synthetic polynucleotide

SEQ ID NO: 6448 - DNA, 55 bp, Artificial Sequence; identical to SEQ ID NO: 4019
  Synthetic polynucleotide

SEQ ID NO: 6449 - DNA, 55 bp, Artificial Sequence; identical to SEQ ID NO: 4020
  Synthetic polynucleotide

SEQ ID NO: 6450 - DNA, 55 bp, Artificial Sequence; identical to SEQ ID NO: 4021
  Synthetic polynucleotide

SEQ ID NO: 6451 - DNA, 55 bp, Artificial Sequence; identical to SEQ ID NO: 4022
  Synthetic polynucleotide

SEQ ID NO: 6452 - DNA, 55 bp, Artificial Sequence; identical to SEQ ID NO: 4023
  Synthetic polynucleotide

SEQ ID NO: 6453 - DNA, 55 bp, Artificial Sequence; identical to SEQ ID NO: 4024
  Synthetic polynucleotide

SEQ ID NO: 6454 - DNA, 55 bp, Artificial Sequence; identical to SEQ ID NO: 4025
  Synthetic polynucleotide

SEQ ID NO: 6455 - DNA, 55 bp, Artificial Sequence; identical to SEQ ID NO: 4026
  Synthetic polynucleotide

SEQ ID NO: 6456 - DNA, 55 bp, Artificial Sequence; identical to SEQ ID NO: 4027
  Synthetic polynucleotide

SEQ ID NO: 6457 - DNA, 55 bp, Artificial Sequence; identical to SEQ ID NO: 4028
  Synthetic polynucleotide

SEQ ID NO: 6458 - DNA, 55 bp, Artificial Sequence; identical to SEQ ID NO: 4029
  Synthetic polynucleotide

SEQ ID NO: 6459 - DNA, 55 bp, Artificial Sequence; identical to SEQ ID NO: 4030
  Synthetic polynucleotide

SEQ ID NO: 6460 - DNA, 55 bp, Artificial Sequence; identical to SEQ ID NO: 4031
  Synthetic polynucleotide

SEQ ID NO: 6461 - DNA, 55 bp, Artificial Sequence; identical to SEQ ID NO: 4032
  Synthetic polynucleotide

SEQ ID NO: 6462 - DNA, 55 bp, Artificial Sequence; identical to SEQ ID NO: 4033
  Synthetic polynucleotide

SEQ ID NO: 6463 - DNA, 55 bp, Artificial Sequence; identical to SEQ ID NO: 4034
  Synthetic polynucleotide

SEQ ID NO: 6464 - DNA, 55 bp, Artificial Sequence; identical to SEQ ID NO: 4035
  Synthetic polynucleotide

SEQ ID NO: 6465 - DNA, 55 bp, Artificial Sequence; identical to SEQ ID NO: 4036
  Synthetic polynucleotide

SEQ ID NO: 6466 - DNA, 55 bp, Artificial Sequence; identical to SEQ ID NO: 4037
  Synthetic polynucleotide

SEQ ID NO: 6467 - DNA, 55 bp, Artificial Sequence; identical to SEQ ID NO: 4038
  Synthetic polynucleotide

SEQ ID NO: 6468 - DNA, 55 bp, Artificial Sequence; identical to SEQ ID NO: 4039
  Synthetic polynucleotide

SEQ ID NO: 6469 - DNA, 55 bp, Artificial Sequence; identical to SEQ ID NO: 4040
  Synthetic polynucleotide

SEQ ID NO: 6470 - DNA, 55 bp, Artificial Sequence; identical to SEQ ID NO: 4041
  Synthetic polynucleotide

SEQ ID NO: 6471 - DNA, 55 bp, Artificial Sequence; identical to SEQ ID NO: 4042
  Synthetic polynucleotide

SEQ ID NO: 6472 - DNA, 55 bp, Artificial Sequence; identical to SEQ ID NO: 4043
  Synthetic polynucleotide

SEQ ID NO: 6473 - DNA, 55 bp, Artificial Sequence; identical to SEQ ID NO: 4044
  Synthetic polynucleotide

SEQ ID NO: 6474 - DNA, 55 bp, Artificial Sequence; identical to SEQ ID NO: 4045
  Synthetic polynucleotide

SEQ ID NO: 6475 - DNA, 55 bp, Artificial Sequence; identical to SEQ ID NO: 4046
  Synthetic polynucleotide

SEQ ID NO: 6476 - DNA, 55 bp, Artificial Sequence; identical to SEQ ID NO: 4047
  Synthetic polynucleotide

SEQ ID NO: 6477 - DNA, 55 bp, Artificial Sequence; identical to SEQ ID NO: 4048
  Synthetic polynucleotide

SEQ ID NO: 6478 - DNA, 55 bp, Artificial Sequence; identical to SEQ ID NO: 4049
  Synthetic polynucleotide

SEQ ID NO: 6479 - DNA, 55 bp, Artificial Sequence; identical to SEQ ID NO: 4050
  Synthetic polynucleotide

SEQ ID NO: 6480 - DNA, 55 bp, Artificial Sequence; identical to SEQ ID NO: 4051
  Synthetic polynucleotide

SEQ ID NO: 6481 - DNA, 55 bp, Artificial Sequence; identical to SEQ ID NO: 4052
  Synthetic polynucleotide

SEQ ID NO: 6482 - DNA, 55 bp, Artificial Sequence; identical to SEQ ID NO: 4053
  Synthetic polynucleotide

SEQ ID NO: 6483 - DNA, 55 bp, Artificial Sequence; identical to SEQ ID NO: 4054
  Synthetic polynucleotide

SEQ ID NO: 6484 - DNA, 55 bp, Artificial Sequence; identical to SEQ ID NO: 4055
  Synthetic polynucleotide

SEQ ID NO: 6485 - DNA, 55 bp, Artificial Sequence; identical to SEQ ID NO: 4056
  Synthetic polynucleotide

SEQ ID NO: 6486 - DNA, 55 bp, Artificial Sequence; identical to SEQ ID NO: 4057
  Synthetic polynucleotide

SEQ ID NO: 6487 - DNA, 55 bp, Artificial Sequence; identical to SEQ ID NO: 4058
  Synthetic polynucleotide

SEQ ID NO: 6488 - DNA, 55 bp, Artificial Sequence; identical to SEQ ID NO: 4059
  Synthetic polynucleotide

SEQ ID NO: 6489 - DNA, 55 bp, Artificial Sequence; identical to SEQ ID NO: 4060
  Synthetic polynucleotide

SEQ ID NO: 6490 - DNA, 55 bp, Artificial Sequence; identical to SEQ ID NO: 4061
  Synthetic polynucleotide

SEQ ID NO: 6491 - DNA, 55 bp, Artificial Sequence; identical to SEQ ID NO: 4062
  Synthetic polynucleotide

SEQ ID NO: 6492 - DNA, 55 bp, Artificial Sequence; identical to SEQ ID NO: 4063
  Synthetic polynucleotide

SEQ ID NO: 6493 - DNA, 55 bp, Artificial Sequence; identical to SEQ ID NO: 4064
  Synthetic polynucleotide

SEQ ID NO: 6494 - DNA, 55 bp, Artificial Sequence; identical to SEQ ID NO: 4065
  Synthetic polynucleotide

SEQ ID NO: 6495 - DNA, 55 bp, Artificial Sequence; identical to SEQ ID NO: 4066
  Synthetic polynucleotide

SEQ ID NO: 6496 - DNA, 55 bp, Artificial Sequence; identical to SEQ ID NO: 4067
  Synthetic polynucleotide

SEQ ID NO: 6497 - DNA, 55 bp, Artificial Sequence; identical to SEQ ID NO: 4068
  Synthetic polynucleotide

SEQ ID NO: 6498 - DNA, 55 bp, Artificial Sequence; identical to SEQ ID NO: 4069
  Synthetic polynucleotide

SEQ ID NO: 6499 - DNA, 55 bp, Artificial Sequence; identical to SEQ ID NO: 4070
  Synthetic polynucleotide

SEQ ID NO: 6500 - DNA, 55 bp, Artificial Sequence; identical to SEQ ID NO: 4071
  Synthetic polynucleotide

SEQ ID NO: 6501 - DNA, 55 bp, Artificial Sequence; identical to SEQ ID NO: 4072
  Synthetic polynucleotide

SEQ ID NO: 6502 - DNA, 55 bp, Artificial Sequence; identical to SEQ ID NO: 4073
  Synthetic polynucleotide

SEQ ID NO: 6503 - DNA, 55 bp, Artificial Sequence; identical to SEQ ID NO: 4074
  Synthetic polynucleotide

SEQ ID NO: 6504 - DNA, 55 bp, Artificial Sequence; identical to SEQ ID NO: 4075
  Synthetic polynucleotide

SEQ ID NO: 6505 - DNA, 55 bp, Artificial Sequence; identical to SEQ ID NO: 4076
  Synthetic polynucleotide

SEQ ID NO: 6506 - DNA, 55 bp, Artificial Sequence; identical to SEQ ID NO: 4077
  Synthetic polynucleotide

SEQ ID NO: 6507 - DNA, 55 bp, Artificial Sequence; identical to SEQ ID NO: 4078
  Synthetic polynucleotide

SEQ ID NO: 6508 - DNA, 55 bp, Artificial Sequence
  Synthetic polynucleotide
tccctcaagtccttccagcagcagcagcagcagcagcagcagcagcagcagcagc

SEQ ID NO: 6509 - DNA, 55 bp, Artificial Sequence
  Synthetic polynucleotide
gagtccctcaagtccttccagcagcagcagcagcagcagcagcagcagcagcagc

SEQ ID NO: 6510 - DNA, 55 bp, Artificial Sequence
  Synthetic polynucleotide
ttcgagtccctcaagtccttccagcagcagcagcagcagcagcagcagcagcagc

SEQ ID NO: 6511 - DNA, 55 bp, Artificial Sequence
  Synthetic polynucleotide
gccttcgagtccctcaagtccttccagcagcagcagcagcagcagcagcagcagc

SEQ ID NO: 6512 - DNA, 55 bp, Artificial Sequence
  Synthetic polynucleotide
aatggtctgtgatccccccagcagcagcagcagcagcagcagcagcagcagcagc

SEQ ID NO: 6513 - DNA, 55 bp, Artificial Sequence
  Synthetic polynucleotide
agaaatggtctgtgatccccccagcagcagcagcagcagcagcagcagcagcagc

SEQ ID NO: 6514 - DNA, 55 bp, Artificial Sequence
  Synthetic polynucleotide
gaaagaaatggtctgtgatccccccagcagcagcagcagcagcagcagcagcagc

SEQ ID NO: 6515 - DNA, 55 bp, Artificial Sequence
  Synthetic polynucleotide
cccggcgccagtttgctgctgctgcagcagcagcagcagcagcagcagcagcagc

SEQ ID NO: 6516 - DNA, 55 bp, Artificial Sequence
  Synthetic polynucleotide
agggggcgtgcggcagcgcggcggcggcggcggcggcggcggcggcggaggcggc

SEQ ID NO: 6517 - DNA, 55 bp, Artificial Sequence
  Synthetic polynucleotide
gccagggggcgtgcggcagcgcggcggcggcggcggcggcggcggcggcggaggc

SEQ ID NO: 6518 - DNA, 55 bp, Artificial Sequence
  Synthetic polynucleotide
gctgccagggggcgtgcggcagcgcggcggcggcggcggcggcggcggcggcgga

SEQ ID NO: 6519 - DNA, 55 bp, Artificial Sequence
  Synthetic polynucleotide
ttagtggtgtcatttagtgctgctctatgccagcatttcctgcaaatgagaaatt

SEQ ID NO: 6520 - DNA, 55 bp, Artificial Sequence
  Synthetic polynucleotide
ttctcatttgcaggaaatgctggcatagagcagcactaaatgacaccactaaaga

SEQ ID NO: 6521 - DNA, 55 bp, Artificial Sequence
  Synthetic polynucleotide
aatttctcatttgcaggaaatgctggcatagagcagcactaaatgacaccactaa

SEQ ID NO: 6522 - DNA, 55 bp, Artificial Sequence
  Synthetic polynucleotide
taatttctcatttgcaggaaatgctggcatagagcagcactaaatgacaccacta

SEQ ID NO: 6523 - DNA, 55 bp, Artificial Sequence
  Synthetic polynucleotide
ctaatttctcatttgcaggaaatgctggcatagagcagcactaaatgacaccact

SEQ ID NO: 6524 - DNA, 55 bp, Artificial Sequence
  Synthetic polynucleotide
tggttctaatttctcatttgcaggaaatgctggcatagagcagcactaaatgaca

SEQ ID NO: 6525 - DNA, 55 bp, Artificial Sequence
  Synthetic polynucleotide
aagtttccaaactaacatcacaaggtgataaggtgatattttagaaactttctcc

SEQ ID NO: 6526 - DNA, 55 bp, Artificial Sequence
  Synthetic polynucleotide
ctcgtcagatttgtccttgcagtcggcagtcggggccaccatcacagcgccagct

SEQ ID NO: 6527 - DNA, 55 bp, Artificial Sequence
  Synthetic polynucleotide
ccccctccttgcaggtccagcaaccaaccacggcatcagcctgcaggagatccca

SEQ ID NO: 6528 - DNA, 55 bp, Artificial Sequence
  Synthetic polynucleotide
caggagccgtacagcttcagcgagccgagccggcccagcaggccatgaggaaggc

SEQ ID NO: 6529 - DNA, 55 bp, Artificial Sequence
  Synthetic polynucleotide
ctctaggagtccctcctacaggaccgaccaaggccaaaagccatggggcactgag

SEQ ID NO: 6530 - DNA, 55 bp, Artificial Sequence
  Synthetic polynucleotide
cgcatgcccagctggtccagctggtccagctggtcccactgctgggcgaggccca

SEQ ID NO: 6531 - DNA, 55 bp, Artificial Sequence
  Synthetic polynucleotide
ggagagaaactgacacagaaaagagaggagaggagagaggtttggggcaggggag

SEQ ID NO: 6532 - DNA, 55 bp, Artificial Sequence
  Synthetic polynucleotide
ttcagtacaattaggtgggcttagatttgtgggcttagatttctactgactacta

SEQ ID NO: 6533 - DNA, 55 bp, Artificial Sequence
  Synthetic polynucleotide
ctcaggggaagctagtatggaggatctgggaggatctgcacccagagatccatgc

SEQ ID NO: 6534 - DNA, 55 bp, Artificial Sequence
  Synthetic polynucleotide
aggaggaggaggaggaggaggaggaggaggaggaggaagaggaggaggctgcagc

SEQ ID NO: 6535 - DNA, 55 bp, Artificial Sequence
  Synthetic polynucleotide
tccttgtcggggggcgggggatggtggtggtggtggtggtggtggtggtggtgct

SEQ ID NO: 6536 - DNA, 55 bp, Artificial Sequence
  Synthetic polynucleotide
cggcgagcggcatgaacatgagcggcatggcggcctgggctcgctgggggacgtg

SEQ ID NO: 6537 - DNA, 55 bp, Artificial Sequence
  Synthetic polynucleotide
gcatgagtatttgtgccacatggctccacatggctccacatgcaagtttgaaaca

SEQ ID NO: 6538 - DNA, 55 bp, Artificial Sequence
  Synthetic polynucleotide
ggtcccaaaagtaaatgttaccaggaggtcaggactattacaacaatccagacac

SEQ ID NO: 6539 - DNA, 55 bp, Artificial Sequence
  Synthetic polynucleotide
ggcccgaaggacgcttgcagccccgggcccgggcccgggcccaggaggcggggga

SEQ ID NO: 6540 - DNA, 55 bp, Artificial Sequence
  Synthetic polynucleotide
aggaggaagaggaagaggaggaggaggaggaggaagaggaggaggtgactgagta

SEQ ID NO: 6541 - DNA, 55 bp, Artificial Sequence
  Synthetic polynucleotide
tggcacagccagcactggcacagccagcactggcacagccagcatcagcaaagcc

SEQ ID NO: 6542 - DNA, 55 bp, Artificial Sequence
  Synthetic polynucleotide
ccaggcggcggcggcgggggcggcggcgggcggccgcgggcatgggcttgggcaa

SEQ ID NO: 6543 - DNA, 55 bp, Artificial Sequence
  Synthetic polynucleotide
gggccagcgagaggccaaagaaacccacccaggaagagcaggcagctgttccctt

SEQ ID NO: 6544 - DNA, 55 bp, Artificial Sequence
  Synthetic polynucleotide
cgtcttccagcggctccgggactgggccccgggactgggccccacggcagacaca

SEQ ID NO: 6545 - DNA, 55 bp, Artificial Sequence
  Synthetic polynucleotide
agacagtgctggaactgacagagacttgtggggtggaggcggctgcagcctccgc

SEQ ID NO: 6546 - DNA, 55 bp, Artificial Sequence
  Synthetic polynucleotide
gactgacttaaacttgatccactgattgattggcaccacgaacttcaaaaggtgg

SEQ ID NO: 6547 - DNA, 55 bp, Artificial Sequence
  Synthetic polynucleotide
ccttggtggagggggtcctgctggtggaggtggaggtggaggtgggagtgaatgt

SEQ ID NO: 6548 - DNA, 55 bp, Artificial Sequence
  Synthetic polynucleotide
tgctctccacgtcgccccggggccgccccggggccgccgacccgggctggagagg

SEQ ID NO: 6549 - DNA, 55 bp, Artificial Sequence
  Synthetic polynucleotide
gaggaagaggaagaagaggaagaagagggaaggggaagaagaagaaggaggagga

SEQ ID NO: 6550 - DNA, 55 bp, Artificial Sequence
  Synthetic polynucleotide
gagcggctgctggaggtgcggaagcggaagcggatcaatgtcctgcccctgggga

SEQ ID NO: 6551 - DNA, 55 bp, Artificial Sequence
  Synthetic polynucleotide
taaaaatggcctgtgtgttaacactagctagggggtcattcaagtgtcagtgtcc

SEQ ID NO: 6552 - DNA, 55 bp, Artificial Sequence
  Synthetic polynucleotide
ttttagatatgaatatcgtgtagagatagatggttcaccagtcctgtaatgatcc

SEQ ID NO: 6553 - DNA, 55 bp, Artificial Sequence
  Synthetic polynucleotide
aggacttgacagtcattactagggaagggaagggaagcctcgtgccgtcattgtg

SEQ ID NO: 6554 - DNA, 55 bp, Artificial Sequence
  Synthetic polynucleotide
gaggagctaaagcagcagccccttggcccttgggtattttgtatcaactgccaaa

SEQ ID NO: 6555 - DNA, 55 bp, Artificial Sequence
  Synthetic polynucleotide
atcgaggtgaagacaaaaggaggatcaaggaggatccaagtacctcatctaccgc

SEQ ID NO: 6556 - DNA, 55 bp, Artificial Sequence
  Synthetic polynucleotide
tggttggagctattttacactcatggttcatggccccagataacaagatcaatga

SEQ ID NO: 6557 - DNA, 55 bp, Artificial Sequence
  Synthetic polynucleotide
tggttaacttcatgtcccaatggatacttatggatacttaaagccttctgtgtca

SEQ ID NO: 6558 - DNA, 55 bp, Artificial Sequence
  Synthetic polynucleotide
gcctcgttgagcgactgggtgcgctggcgctggcgctcgcgcacgttggccagga

SEQ ID NO: 6559 - DNA, 55 bp, Artificial Sequence
  Synthetic polynucleotide
aacttgtcagcagaaaggccttctggattctggcttaatagggtattcactactt

SEQ ID NO: 6560 - DNA, 55 bp, Artificial Sequence
  Synthetic polynucleotide
gcagtccctaggccgtttgagggacaggtgagggacagctgcacagaggtctggg

SEQ ID NO: 6561 - DNA, 55 bp, Artificial Sequence
  Synthetic polynucleotide
gcaagagacggctggagtgtgaggagtgtgaggagtgtggcggcctgggctcccc

SEQ ID NO: 6562 - DNA, 55 bp, Artificial Sequence
  Synthetic polynucleotide
acatgggacgtgtgaactatggtgcatatatggtgcatatatcaacgattttaag

SEQ ID NO: 6563 - DNA, 55 bp, Artificial Sequence
  Synthetic polynucleotide
tgcgggagactcgggagctggagctggagctggaggaggagttgtacgccaagct

SEQ ID NO: 6564 - DNA, 55 bp, Artificial Sequence
  Synthetic polynucleotide
ctcctcctcctcctccgctcggcgcggcggcggcggcggcggcggccattttccg

SEQ ID NO: 6565 - DNA, 55 bp, Artificial Sequence
  Synthetic polynucleotide
gacagaggtgttggcagtggtggcatgaggtggcatgaggaatagtgacaggcac

SEQ ID NO: 6566 - DNA, 55 bp, Artificial Sequence
  Synthetic polynucleotide
ccccgcctcataccagcccgacgagggacgaggaggagcgagcgcgcctggcggg

SEQ ID NO: 6567 - DNA, 55 bp, Artificial Sequence
  Synthetic polynucleotide
acaggggaactagtcacatgattggcagattggcattctgcatgacctgaacagg

SEQ ID NO: 6568 - DNA, 55 bp, Artificial Sequence
  Synthetic polynucleotide
caggctgagctgcgagagctgcggcagctgcggctgcggctcgatcaactcaccg

SEQ ID NO: 6569 - DNA, 55 bp, Artificial Sequence
  Synthetic polynucleotide
gggcgtcctgctcaactccggcatcggcatcggggaaggtaaggccccgcccggc

SEQ ID NO: 6570 - DNA, 55 bp, Artificial Sequence
  Synthetic polynucleotide
tgcggtgggtgggtacaggtcctcctgaacaggtccgactgtgggcaaggccagg

SEQ ID NO: 6571 - DNA, 55 bp, Artificial Sequence
  Synthetic polynucleotide
ggtctccttgttgcccttggtgagcacgctgggtgagcacgctgaccacgccatg

SEQ ID NO: 6572 - DNA, 55 bp, Artificial Sequence
  Synthetic polynucleotide
ccaaatctctcttggtgactgagttgggctgggctcttccagaacaccagagact

SEQ ID NO: 6573 - DNA, 55 bp, Artificial Sequence
  Synthetic polynucleotide
cagcagcagcagcagcagcggcggcggcggcggcagctcctccacaggtacctca

SEQ ID NO: 6574 - DNA, 55 bp, Artificial Sequence
  Synthetic polynucleotide
ctggtgccagacatcatgtgcggggatgcggggatgtctcctgtccagtacacca

SEQ ID NO: 6575 - DNA, 55 bp, Artificial Sequence
  Synthetic polynucleotide
tcattgaatttcattgactatttcattgactgggttttcttcctccttaaccaag

SEQ ID NO: 6576 - DNA, 55 bp, Artificial Sequence
  Synthetic polynucleotide
gtttccctggataaacacagagggagtgagtggctttggcgtcttatggtgaggc

SEQ ID NO: 6577 - DNA, 55 bp, Artificial Sequence
  Synthetic polynucleotide
aaccaggcaagccaggtagcccaggttggttggcctggatttcccttctctcctt

SEQ ID NO: 6578 - DNA, 55 bp, Artificial Sequence
  Synthetic polynucleotide
gcgggcgcgggaagatggcggcagcggcagcggcggcggcggctgcagaacaggt

SEQ ID NO: 6579 - DNA, 55 bp, Artificial Sequence
  Synthetic polynucleotide
tggacatcgtcttcctgctgcggctccgagcggctgggtgagcagaacttccaca

SEQ ID NO: 6580 - DNA, 55 bp, Artificial Sequence
  Synthetic polynucleotide
ctttgccccaagtggcaatggcaatggcaatggctatggcccaggagggacaggc

SEQ ID NO: 6581 - DNA, 55 bp, Artificial Sequence
  Synthetic polynucleotide
tggggcctggcagcttcccccgctttcggtcggatgagcacgcagcccagtccaa

SEQ ID NO: 6582 - DNA, 55 bp, Artificial Sequence
  Synthetic polynucleotide
ggaggaagaagaggaggaagaagaggaaagaggatgaagaggaggaagaagagga

SEQ ID NO: 6583 - DNA, 55 bp, Artificial Sequence
  Synthetic polynucleotide
ccaggcggcggcggcgggggcggcggcaggcggccgcgggcatgggcttgggcaa

SEQ ID NO: 6584 - DNA, 55 bp, Artificial Sequence
  Synthetic polynucleotide
cccgccagcaccagctcgcgcaggctgcgcaggctgcccaggccgcggaacgccg

SEQ ID NO: 6585 - DNA, 55 bp, Artificial Sequence
  Synthetic polynucleotide
cagcaggacgcggaagagcagggagtaagtagggcacggaccccagccgcacggc

SEQ ID NO: 6586 - DNA, 55 bp, Artificial Sequence
  Synthetic polynucleotide
cggcgcggatgctgcggacgccgggacgccgggacgccacggctacgccgccgag

SEQ ID NO: 6587 - DNA, 55 bp, Artificial Sequence
  Synthetic polynucleotide
agcgtctctgaagactgctcagggctactcagggctatcctctcagagtgacatt

SEQ ID NO: 6588 - DNA, 55 bp, Artificial Sequence
  Synthetic polynucleotide
cagccttctctgtctctcttggcagtcagtcggtcttggcagctgttgtaattgc

SEQ ID NO: 6589 - DNA, 55 bp, Artificial Sequence
  Synthetic polynucleotide
ggcctgaaaaccgtgctcctggggctgggctgggctgggccaggatcgccaggtc

SEQ ID NO: 6590 - DNA, 55 bp, Artificial Sequence
  Synthetic polynucleotide
gtccgcgcagcgccccctcgcggtgcggtgcggtccgggactgcgcccctgcgca

SEQ ID NO: 6591 - DNA, 55 bp, Artificial Sequence
  Synthetic polynucleotide
ccgccgtctcgtgcccagccagccagccagagggacacccggcggacgtctggcc

SEQ ID NO: 6592 - DNA, 55 bp, Artificial Sequence
  Synthetic polynucleotide
aaatgtaagaaaaatctgctagaggaaaagaggaacattcaatgtcacctgaaag

SEQ ID NO: 6593 - DNA, 55 bp, Artificial Sequence
  Synthetic polynucleotide
acacctgcgtgccctccgtcagcagcagcaagggcatcatggaggaggatgaggc

SEQ ID NO: 6594 - DNA, 55 bp, Artificial Sequence
  Synthetic polynucleotide
tgcggtggacgatggaggggccggactggaggggccggactcgtcatactcctgc

SEQ ID NO: 6595 - DNA, 55 bp, Artificial Sequence
  Synthetic polynucleotide
ctcgaagctcgccttcagcgccaggatctccggatctcctcctccacctgccgcc

SEQ ID NO: 6596 - DNA, 55 bp, Artificial Sequence
  Synthetic polynucleotide
tttagttcttccacactggcaagtccacactggcaagattgctgttcaccatcct

SEQ ID NO: 6597 - DNA, 55 bp, Artificial Sequence
  Synthetic polynucleotide
ttacaggattgagacggagggggagcaagcaggagctgtggaaatatacgatcga

SEQ ID NO: 6598 - DNA, 55 bp, Artificial Sequence
  Synthetic polynucleotide
accggggaggcagtgtatcgctcccggcccgggaccccgtgcgcaacttgcgcct

SEQ ID NO: 6599 - DNA, 55 bp, Artificial Sequence
  Synthetic polynucleotide
ttgggagaatttaggatctgaatccagtccaggtaactaaagaaaaaaacttttt

SEQ ID NO: 6600 - DNA, 55 bp, Artificial Sequence
  Synthetic polynucleotide
gacccgcagacgctctcgggcattgattgttggccatcctccgctccttctcacg

SEQ ID NO: 6601 - DNA, 55 bp, Artificial Sequence
  Synthetic polynucleotide
cacatcttgccatgatctctggaggaagcgaggaggcggccggccgcactgggag

SEQ ID NO: 6602 - DNA, 55 bp, Artificial Sequence
  Synthetic polynucleotide
ctgtagatctagctgcgccacgggctgggctgggccgggccgggcagggggctac

SEQ ID NO: 6603 - DNA, 55 bp, Artificial Sequence
  Synthetic polynucleotide
ggcggaagctccggcggcggaagctcccggcggcggccacggcggcggccacggc

SEQ ID NO: 6604 - DNA, 55 bp, Artificial Sequence
  Synthetic polynucleotide
ctgggggggctgcggtgccgggggcggcggcggcggcggcggctgctgctgctgc

SEQ ID NO: 6605 - DNA, 55 bp, Artificial Sequence
  Synthetic polynucleotide
tttgttatttaaggtgaagcagcatctatctgggtgtgagagtgaaacaagcgtc

SEQ ID NO: 6606 - DNA, 55 bp, Artificial Sequence
  Synthetic polynucleotide
agacatcgggaagattctgatgtggaatggtggaagatgattcccgaaaggaaat

SEQ ID NO: 6607 - DNA, 55 bp, Artificial Sequence
  Synthetic polynucleotide
gaaggcaagagaaaaagagaggaggaggggaggaggctaaagagaggagcgtaag

SEQ ID NO: 6608 - DNA, 55 bp, Artificial Sequence
  Synthetic polynucleotide
ttcccggcgcaggtactacgagaccgagaccggcagcatcaagccgggtgtgatc

SEQ ID NO: 6609 - DNA, 55 bp, Artificial Sequence
  Synthetic polynucleotide
aggaagcagcggcaggggacgcccggctcgcggctcgggcacactggacgtacct

SEQ ID NO: 6610 - DNA, 55 bp, Artificial Sequence
  Synthetic polynucleotide
ccagcctcatcaaccagaagaagaagaagatggatgctgacctgtcccagctcca

SEQ ID NO: 6611 - DNA, 55 bp, Artificial Sequence
  Synthetic polynucleotide
actgtctcctaaaggaaatgcagcagtatgtggtccattcctccatttcctgtaa

SEQ ID NO: 6612 - DNA, 55 bp, Artificial Sequence
  Synthetic polynucleotide
aaggtaagctgagcttgctcctttctttcttggagggatgaggatcacagagttt

SEQ ID NO: 6613 - DNA, 55 bp, Artificial Sequence
  Synthetic polynucleotide
gggagcagggagtggtactgcgaatggtggtggtggtggtggtggtccggggagc

SEQ ID NO: 6614 - DNA, 55 bp, Artificial Sequence
  Synthetic polynucleotide
ccaaaccttggatacatcccagactagactaggtttaatgtgagaacggaagata

SEQ ID NO: 6615 - DNA, 55 bp, Artificial Sequence
  Synthetic polynucleotide
gcgcggcggcggcggcggcggcggcggcggcggcggcggcatggagcgcagtggc

SEQ ID NO: 6616 - DNA, 55 bp, Artificial Sequence
  Synthetic polynucleotide
gatgctctgggccacgccagggtactactgtgggggtatgggtgaggcaggggag

SEQ ID NO: 6617 - DNA, 55 bp, Artificial Sequence
  Synthetic polynucleotide
gcccaggagcttgccctgggactccagcctgggactccaggctggagctccggtg

SEQ ID NO: 6618 - DNA, 55 bp, Artificial Sequence
  Synthetic polynucleotide
ctggcggcgcgcagaccctccgagcagagcaggcatcgtagtagttcaggaagcc

SEQ ID NO: 6619 - DNA, 55 bp, Artificial Sequence
  Synthetic polynucleotide
gccgtggttaaggagctgtgcacgacgacacgggtgctgggcatggagctggctg

SEQ ID NO: 6620 - DNA, 55 bp, Artificial Sequence
  Synthetic polynucleotide
ctgtgactgcttgtagatggccatggcccatggcgcggacgcgggtgccgggcgg

SEQ ID NO: 6621 - DNA, 55 bp, Artificial Sequence
  Synthetic polynucleotide
atttacctaaaattttgaatggataatgaatggataatcgttcttcttcctgaaa

SEQ ID NO: 6622 - DNA, 55 bp, Artificial Sequence
  Synthetic polynucleotide
ctctgccgccttgcaggggaagaacagaacagggctttctcgtagtcctgcaggg

SEQ ID NO: 6623 - DNA, 55 bp, Artificial Sequence
  Synthetic polynucleotide
ctctgtggaagtgctcagcattggcagcattggagtgaatggagccacccaatcc

SEQ ID NO: 6624 - DNA, 55 bp, Artificial Sequence
  Synthetic polynucleotide
catgttgagtcatgcccttctaaaggttaaaggagctattttttctttggcatca

SEQ ID NO: 6625 - DNA, 55 bp, Artificial Sequence
  Synthetic polynucleotide
aatggtgtggacatctactcgctggtgagctggtgactgaaaacattcagtggcc

SEQ ID NO: 6626 - DNA, 55 bp, Artificial Sequence
  Synthetic polynucleotide
aataatcttctactaatgaatggtagtgaatggtagtgagttgaaaataatgtac

SEQ ID NO: 6627 - DNA, 55 bp, Artificial Sequence
  Synthetic polynucleotide
tgcggtcctgctgtccctggcttttatccctggcttttatcacttacgtggagca

SEQ ID NO: 6628 - DNA, 55 bp, Artificial Sequence
  Synthetic polynucleotide
ataagaagaagaagaagaagaagaagaagaaggacagtgtggacacagtggccat

SEQ ID NO: 6629 - DNA, 55 bp, Artificial Sequence
  Synthetic polynucleotide
tagttgtcaatcagaaggggtaatccagaaggggtaatccaatcaggttcccttc

SEQ ID NO: 6630 - DNA, 55 bp, Artificial Sequence
  Synthetic polynucleotide
acacctttttctgatgtgctttgttctttctggatttcgcaggtcctcaagggca

SEQ ID NO: 6631 - DNA, 55 bp, Artificial Sequence
  Synthetic polynucleotide
cgcctgcccggacggcatgctgctggctgctggccagggacatgaggagctgcct

SEQ ID NO: 6632 - DNA, 55 bp, Artificial Sequence
  Synthetic polynucleotide
gctgctgctgctgctgctgctgctgctcctgggtcccgcgggcgcccgtgcgcag

SEQ ID NO: 6633 - DNA, 55 bp, Artificial Sequence
  Synthetic polynucleotide
ttgtggacgaatacgaccccactatagaagaggtgagcctggcgccgccgtccag

SEQ ID NO: 6634 - DNA, 55 bp, Artificial Sequence
  Synthetic polynucleotide
ccatcaacatggccaggatgggcagcaagcaggagccccagcacgcaggggacca

SEQ ID NO: 6635 - DNA, 55 bp, Artificial Sequence
  Synthetic polynucleotide
gtgcaagcggaaggtgacagtgcctgcctgtggtctctgtgcggagtccaaagcg

SEQ ID NO: 6636 - DNA, 55 bp, Artificial Sequence
  Synthetic polynucleotide
cgccgcgccgagcggaggaggaggaggaggaggcgaggaggagagactgtgagtg

SEQ ID NO: 6637 - DNA, 55 bp, Artificial Sequence
  Synthetic polynucleotide
gcggctgcgatcaccgtgcggcacagctcgtggcacagctcgtcgcacagtggat

SEQ ID NO: 6638 - DNA, 55 bp, Artificial Sequence
  Synthetic polynucleotide
gctggagtcacccttcccagtgaggcaggcaggggtcgttaggggaggtgatacg

SEQ ID NO: 6639 - DNA, 55 bp, Artificial Sequence
  Synthetic polynucleotide
gttgctgttcatgatggctggcatgatggctggcatgacagtgtccatgtacctc

SEQ ID NO: 6640 - DNA, 55 bp, Artificial Sequence
  Synthetic polynucleotide
gacgggatgatctcggtgatgagcagcagcaggaagacggtgagcgacagcagca

SEQ ID NO: 6641 - DNA, 55 bp, Artificial Sequence
  Synthetic polynucleotide
tgcacattcgggtcaactggtagacacaactggtagacagcctcaaagccctggt

SEQ ID NO: 6642 - DNA, 55 bp, Artificial Sequence
  Synthetic polynucleotide
aaaatttttttttatagttatgaggaaatgaggaaaaaaagaggaagagaagatg

SEQ ID NO: 6643 - DNA, 55 bp, Artificial Sequence
  Synthetic polynucleotide
gaccccgactgcgaagatggctcggaggctcggatgagtggccgcagcgctgtag

SEQ ID NO: 6644 - DNA, 55 bp, Artificial Sequence
  Synthetic polynucleotide
tggcagggctgagctggcccggcggcggcccggcggcggcgcggcggccccgtgg

SEQ ID NO: 6645 - DNA, 55 bp, Artificial Sequence
  Synthetic polynucleotide
cggcggcggcggcggcggcggcggcggcggcggcatggagcgcagtggctgggcc

SEQ ID NO: 6646 - DNA, 55 bp, Artificial Sequence
  Synthetic polynucleotide
tggcctgcagctgcagaaggtgactgcagaaggtgactgtcctgggcgtggccac

SEQ ID NO: 6647 - DNA, 55 bp, Artificial Sequence
  Synthetic polynucleotide
aaggcctggttgtccttttgctccaggcaggggttcctggtaatccgggcaaacc

SEQ ID NO: 6648 - DNA, 55 bp, Artificial Sequence
  Synthetic polynucleotide
cctactatctcaatataactggataataactggataacctcatcccactcagaaa

SEQ ID NO: 6649 - DNA, 55 bp, Artificial Sequence
  Synthetic polynucleotide
tgatgatgatgatgatgatgatgatgatgatggttttacagggagatcgagggtt

SEQ ID NO: 6650 - DNA, 55 bp, Artificial Sequence
  Synthetic polynucleotide
tcttgatctcccaggtatttcttgctgtgctggcgatcctcaccatcctcggcgt

SEQ ID NO: 6651 - DNA, 55 bp, Artificial Sequence
  Synthetic polynucleotide
gacaattctcacatggtggagagtggaaggtggagagtggaaggtagacagtgat

SEQ ID NO: 6652 - DNA, 55 bp, Artificial Sequence
  Synthetic polynucleotide
ccatcctctgttgctggtgaagtggttaagtggtttttaatactggcctgggagg

SEQ ID NO: 6653 - DNA, 55 bp, Artificial Sequence
  Synthetic polynucleotide
acctccagaactgaggaatgcagaatgcagcggttgacacggcccccacagctga

SEQ ID NO: 6654 - DNA, 55 bp, Artificial Sequence
  Synthetic polynucleotide
cacgtgccagacacaggagctgtttctttctggcccacgctgggaacgattggga

SEQ ID NO: 6655 - DNA, 55 bp, Artificial Sequence
  Synthetic polynucleotide
ttttaacagattttgcaagaatttatcatcaggatcaaggtagatgtgtatatcg

SEQ ID NO: 6656 - DNA, 55 bp, Artificial Sequence
  Synthetic polynucleotide
agcgggcggcacagcacctccggggggcggcggcggcggcggcagcgccagaagc

SEQ ID NO: 6657 - DNA, 55 bp, Artificial Sequence
  Synthetic polynucleotide
agtgggagcgcgcgggcaggcagacggggggggcgcacggcggccgagcgcacca

SEQ ID NO: 6658 - DNA, 55 bp, Artificial Sequence
  Synthetic polynucleotide
gcgcggcggcggcggcggcggcggcggcggcggcatggagcgcagtggctgggcc

SEQ ID NO: 6659 - DNA, 55 bp, Artificial Sequence
  Synthetic polynucleotide
ctcccgggcccgctgcttcgtgcggctggctggcgctgcgctcctccgcgtacaa

SEQ ID NO: 6660 - DNA, 55 bp, Artificial Sequence
  Synthetic polynucleotide
ctttggggttgcccatgatggcagaggcagaggcagaggacaggttgccaaagct

SEQ ID NO: 6661 - DNA, 55 bp, Artificial Sequence
  Synthetic polynucleotide
gatgcgcacctggcggaggcggcggcgcggcgggggcgctgccactggtgcagga

SEQ ID NO: 6662 - DNA, 55 bp, Artificial Sequence
  Synthetic polynucleotide
tgcaagacaagctgaacattggctgaacattggctaccacggcatggctagggct

SEQ ID NO: 6663 - DNA, 55 bp, Artificial Sequence
  Synthetic polynucleotide
gctaggaatactcaccaccccctggagggagggagggagggatgagcccacagta

SEQ ID NO: 6664 - DNA, 55 bp, Artificial Sequence
  Synthetic polynucleotide
ttctttctttccagacactacaacaacaacaggagtgcaaacttctctacagccg

SEQ ID NO: 6665 - DNA, 55 bp, Artificial Sequence
  Synthetic polynucleotide
tcgcggtgaacctggtactcctgggtctcctgggtcccctgggcctgctggtgcc

SEQ ID NO: 6666 - DNA, 55 bp, Artificial Sequence
  Synthetic polynucleotide
taccgtctctcggcccggcggcacacggcccggcggcacacggcccggcagaaat

SEQ ID NO: 6667 - DNA, 55 bp, Artificial Sequence
  Synthetic polynucleotide
cggcggcggcggcggcggcggcggcggcggcggcagcggccgccacggccacggc

SEQ ID NO: 6668 - DNA, 55 bp, Artificial Sequence
  Synthetic polynucleotide
agcgaacggcggcggcggcggcggcggcggcggcaccatccaggcgggcaccatg

SEQ ID NO: 6669 - DNA, 55 bp, Artificial Sequence
  Synthetic polynucleotide
gctgagctgcgagagctgcggctgcggctgcggctcgatcaactcaccgccaaca

SEQ ID NO: 6670 - DNA, 55 bp, Artificial Sequence
  Synthetic polynucleotide
cggcagggctcagcttgaaggcagcggcggcggcggcggcggcggcggcggcgtg

SEQ ID NO: 6671 - DNA, 55 bp, Artificial Sequence
  Synthetic polynucleotide
gtgtgtgtgtccctgcggcgctaagtaagaaggggagactgaggctgaggctggg

SEQ ID NO: 6672 - DNA, 55 bp, Artificial Sequence
  Synthetic polynucleotide
gtcgttgaaggcggccgggtcgatgtaggtaggcgctgatgtcgatggacgtctc

SEQ ID NO: 6673 - DNA, 55 bp, Artificial Sequence
  Synthetic polynucleotide
ctcttgaggcgccgcgtccggggccggggccggggccggggcgggggccggggcc

SEQ ID NO: 6674 - DNA, 55 bp, Artificial Sequence
  Synthetic polynucleotide
gctcgatgacgtccatcacgtcgtagggcagggccgcaggctctccttgaacttc

SEQ ID NO: 6675 - DNA, 55 bp, Artificial Sequence
  Synthetic polynucleotide
cgccgcgccgagcggaggaggaggaggaggaggaggcgaggaggagagactgtga

SEQ ID NO: 6676 - DNA, 55 bp, Artificial Sequence
  Synthetic polynucleotide
ggctgaactttgcagacgaggacgaggacgaggcccaggccttccgggccctcgt

SEQ ID NO: 6677 - DNA, 55 bp, Artificial Sequence
  Synthetic polynucleotide
gcgtccgaccccagcgacgggcagcggcggcggcggcagcagcagcagcagcagc

SEQ ID NO: 6678 - DNA, 55 bp, Artificial Sequence
  Synthetic polynucleotide
ataaccccggcttcgaggccgaggaggaggaggagggagaggtggaaggggaaga

SEQ ID NO: 6679 - DNA, 55 bp, Artificial Sequence
  Synthetic polynucleotide
accttgatcttggagtcatttttgttgtgttggcagaccttctgaaattttatat

SEQ ID NO: 6680 - DNA, 55 bp, Artificial Sequence
  Synthetic polynucleotide
agcagctccagtgaccgcttgaactggctgtggctgctaagtgtgggcgagcgct

SEQ ID NO: 6681 - DNA, 55 bp, Artificial Sequence
  Synthetic polynucleotide
gacaggcggagcggggcggctggcccgcccgggccctcctggcggacgtcgccga

SEQ ID NO: 6682 - DNA, 55 bp, Artificial Sequence
  Synthetic polynucleotide
ctggattggaaggtaacccaggagaaagtcaggagaaagtgccctggggcatcgt

SEQ ID NO: 6683 - DNA, 55 bp, Artificial Sequence
  Synthetic polynucleotide
tgggctcgggggcccccgctgctggcaggcaggctgagcagtgagcccagttcat

SEQ ID NO: 6684 - DNA, 55 bp, Artificial Sequence
  Synthetic polynucleotide
ggaatggcctgagggtcggcctcagcttttcggcctcagcttttcgcttcctgcc

SEQ ID NO: 6685 - DNA, 55 bp, Artificial Sequence
  Synthetic polynucleotide
ccacagctgccgccgctaccggctcgccaccggctcgccaccatcgccaacttct

SEQ ID NO: 6686 - DNA, 55 bp, Artificial Sequence
  Synthetic polynucleotide
tcagttctgccctgtggcctgctgcctgcctggaccccggaggagccagctacag

SEQ ID NO: 6687 - DNA, 55 bp, Artificial Sequence
  Synthetic polynucleotide
catggtgatcaaacgccccggcaggaagccaggaagcgaaaagctgaggccgacc

SEQ ID NO: 6688 - DNA, 55 bp, Artificial Sequence
  Synthetic polynucleotide
ttgtggacgaatacgaccccactatagaggaggtgagcctggcgccgccgtccag

SEQ ID NO: 6689 - DNA, 55 bp, Artificial Sequence
  Synthetic polynucleotide
gacgaggaggagcgagcgcgcctggcgggcgggcgaggaggaggcgctgcgtcag

SEQ ID NO: 6690 - DNA, 55 bp, Artificial Sequence
  Synthetic polynucleotide
ctctctctctctctctctctctctctctgcaggaacggagctttgactgtaagat

SEQ ID NO: 6691 - DNA, 55 bp, Artificial Sequence
  Synthetic polynucleotide
atggtggccccgactgcaaggacaaatctgaggacaaatctgacgaggaaaactg

SEQ ID NO: 6692 - DNA, 55 bp, Artificial Sequence
  Synthetic polynucleotide
ctcgctgtagcgctcctggctggcgcggcgcggcgcggcaggaagaaccagcgct

SEQ ID NO: 6693 - DNA, 55 bp, Artificial Sequence
  Synthetic polynucleotide
aagtctggatctaaaaatttgctgaagtgaaggggctccgtggctggtaaatctg

SEQ ID NO: 6694 - DNA, 55 bp, Artificial Sequence
  Synthetic polynucleotide
gatctagctgcgccacgggctgggccgggccgggccgggcagggggctaccaccc

SEQ ID NO: 6695 - DNA, 55 bp, Artificial Sequence
  Synthetic polynucleotide
tgctggaacttcagggcccgcagcaacaactggtcacccttctccagggtcagct

SEQ ID NO: 6696 - DNA, 55 bp, Artificial Sequence
  Synthetic polynucleotide
aggaagaggaggaggaggaggaggaggaggaggaaggcgaggacagtggcacttc

SEQ ID NO: 6697 - DNA, 55 bp, Artificial Sequence
  Synthetic polynucleotide
gaggggttggccacacgggccttgacgtacgggccttgacgtgcggccctccggt

SEQ ID NO: 6698 - DNA, 55 bp, Artificial Sequence
  Synthetic polynucleotide
aggtcatccagcaggacaacagatggctgatggctgcatccacactgcctctgag

SEQ ID NO: 6699 - DNA, 55 bp, Artificial Sequence
  Synthetic polynucleotide
agacctacttcctctttggctcttttcttcaggagagcttgcttgttttcaaatt

SEQ ID NO: 6700 - DNA, 55 bp, Artificial Sequence
  Synthetic polynucleotide
gccctttaagaatgcaaccgaagcaggatgcggtgcgggttggcggcctgggcgg

SEQ ID NO: 6701 - DNA, 55 bp, Artificial Sequence
  Synthetic polynucleotide
ggccactcaccgatgacggcattggcgcattggcgatggtgatcttgagccacat

SEQ ID NO: 6702 - DNA, 55 bp, Artificial Sequence
  Synthetic polynucleotide
cggcggcggcggcggctgctgctgctgctgcggcggcggcggcggttgcggggcg

SEQ ID NO: 6703 - DNA, 55 bp, Artificial Sequence
  Synthetic polynucleotide
catccgagccatcttcgcagtcttcgcagtcggggtcgttgtcgcaggcccacag

SEQ ID NO: 6704 - DNA, 55 bp, Artificial Sequence
  Synthetic polynucleotide
aggaggaggaggaggaggaggaggaggaggaggaagaggaggaggctgcagcggc

SEQ ID NO: 6705 - DNA, 55 bp, Artificial Sequence
  Synthetic polynucleotide
cgccacgggctgggccgggccgggcagggcagggggctaccaccccgcgccgcag

SEQ ID NO: 6706 - DNA, 55 bp, Artificial Sequence
  Synthetic polynucleotide
gtctgcgcctctgcggggccacggtcggtcggggcacagcgggcagccccaaggg

SEQ ID NO: 6707 - DNA, 55 bp, Artificial Sequence
  Synthetic polynucleotide
gggcgggggcggtggctggggcggcggcggcggctgctgctgcatccctcgcggg

SEQ ID NO: 6708 - DNA, 55 bp, Artificial Sequence
  Synthetic polynucleotide
ccacaagcctggcccggaacatggacggaccggctctcactggatgaggagcact

SEQ ID NO: 6709 - DNA, 55 bp, Artificial Sequence
  Synthetic polynucleotide
gggcctttggggactctgagtggtgggtgatggtggtggtgctccttcttggggg

SEQ ID NO: 6710 - DNA, 55 bp, Artificial Sequence
  Synthetic polynucleotide
gtccatgtcgtattatgagactgtttgttttggacaccccagagatacagagagt

SEQ ID NO: 6711 - DNA, 55 bp, Artificial Sequence
  Synthetic polynucleotide
agcggcgccgcgcctcgcctcgcctcgcctcgggctctgctctccgccggatcgg

SEQ ID NO: 6712 - DNA, 55 bp, Artificial Sequence
  Synthetic polynucleotide
gtggctttctcagaggcagtgtggacagtgtggatgcagccatctgttgtcctgc

SEQ ID NO: 6713 - DNA, 55 bp, Artificial Sequence
  Synthetic polynucleotide
cccgcggtcacgctacctggcgcggctccctggcgcggctcgcggcgtctgggtt

SEQ ID NO: 6714 - DNA, 55 bp, Artificial Sequence
  Synthetic polynucleotide
tgccatgggcaagtacgtggacaagctacgtggacaagcggctggagcagctcgg

SEQ ID NO: 6715 - DNA, 55 bp, Artificial Sequence
  Synthetic polynucleotide
tcttgttacaagcttaaaaggactatgctatggacacttcgtgccttcggacggc

SEQ ID NO: 6716 - DNA, 55 bp, Artificial Sequence
  Synthetic polynucleotide
cgggggcgcggcgggggcgcggctggggcgcggctgctggagcggtaccgccgcg

SEQ ID NO: 6717 - DNA, 55 bp, Artificial Sequence
  Synthetic polynucleotide
gtgcctgacttacctcacggtgggccttcacggtgggcctcgctggagattttat

SEQ ID NO: 6718 - DNA, 55 bp, Artificial Sequence
  Synthetic polynucleotide
agcctcaagtgggcacacttgaagaaagaaaggaatgacgtcgtggaagcactga

SEQ ID NO: 6719 - DNA, 55 bp, Artificial Sequence
  Synthetic polynucleotide
gctggcccctgcccctgcccctgctgactgaggccactggagcccctggagaagc

SEQ ID NO: 6720 - DNA, 55 bp, Artificial Sequence
  Synthetic polynucleotide
accgagtttgtggccctagtacctacctgatggggcgcgggctgaggcacctggc

SEQ ID NO: 6721 - DNA, 55 bp, Artificial Sequence
  Synthetic polynucleotide
tctaccggcttgggccggggcggtttggggcggtttggggcgcagatagccgtgc

SEQ ID NO: 6722 - DNA, 55 bp, Artificial Sequence
  Synthetic polynucleotide
tcccgctgtgggatgttgtgctgctgctgcaggtaggacttgaccatcttcgcca

SEQ ID NO: 6723 - DNA, 55 bp, Artificial Sequence
  Synthetic polynucleotide
ggtcaactcccgcggccagctgcgaggaggaggaggagttgccccctgaccctag

SEQ ID NO: 6724 - DNA, 55 bp, Artificial Sequence
  Synthetic polynucleotide
gtgggctcccgccgcgagaggttatgggagaggttatgggctcccaggaccaccc

SEQ ID NO: 6725 - DNA, 55 bp, Artificial Sequence
  Synthetic polynucleotide
cacaatcaataaactggagaaaaataggataggagaacggtcagcatcggtgtgg

SEQ ID NO: 6726 - DNA, 55 bp, Artificial Sequence
  Synthetic polynucleotide
ctttttaggatcccctgccttgactggaactggaactggaacaatcaacgtcata

SEQ ID NO: 6727 - DNA, 55 bp, Artificial Sequence
  Synthetic polynucleotide
atactcatctttctttaaacgagaaggagaaggtctagattcaatgtgggtcagg

SEQ ID NO: 6728 - DNA, 55 bp, Artificial Sequence
  Synthetic polynucleotide
ccccgtactcgtacgtggcgctcatcgccgtggcgctcatcgccatggcgatccg

SEQ ID NO: 6729 - DNA, 55 bp, Artificial Sequence
  Synthetic polynucleotide
agtgggaccagctggaccagctgggccagctgggcatgcgcatgcagcacaacct

SEQ ID NO: 6730 - DNA, 55 bp, Artificial Sequence
  Synthetic polynucleotide
ccggaggcggaggtaggctcgggaaggcggcggcggcggcggcggcggcagcggc

SEQ ID NO: 6731 - DNA, 55 bp, Artificial Sequence
  Synthetic polynucleotide
gacctggggcgccgggcgcgatgggcgcgatgggcgcgtagagcgcgccgcccgc

SEQ ID NO: 6732 - DNA, 55 bp, Artificial Sequence
  Synthetic polynucleotide
tcatagaacatatcgaagtcgtcctcactcgggctcggtgctctcctccgtggcc

SEQ ID NO: 6733 - DNA, 55 bp, Artificial Sequence
  Synthetic polynucleotide
gccccacgcactctgcggcaagtccctctgcggcaagtcctcggcccggaagacc

SEQ ID NO: 6734 - DNA, 55 bp, Artificial Sequence
  Synthetic polynucleotide
accccctggtgaacctgggcaagctggacctgggcaagctggtccttcagtaagt

SEQ ID NO: 6735 - DNA, 55 bp, Artificial Sequence
  Synthetic polynucleotide
gtcgtccctgagtcaggcgaccggcggcggcggcggcggcggcgggggaggccag

SEQ ID NO: 6736 - DNA, 55 bp, Artificial Sequence
  Synthetic polynucleotide
acgaaggcctgtgggtgctgagggtgccgagggtgccgtccaccatggtgtggcg

SEQ ID NO: 6737 - DNA, 55 bp, Artificial Sequence
  Synthetic polynucleotide
tcccgccgagggtccacagacagcgggtggtggtggtggtggtggtggtggtggc

SEQ ID NO: 6738 - DNA, 55 bp, Artificial Sequence
  Synthetic polynucleotide
acagcggctgcgatcaccgtgcggcacgtgcggcacagctcgtcgcacagtggat

SEQ ID NO: 6739 - DNA, 55 bp, Artificial Sequence
  Synthetic polynucleotide
cttccaaaccagctctggcacagccagctctggcacagccagcactggcacagcc

SEQ ID NO: 6740 - DNA, 55 bp, Artificial Sequence
  Synthetic polynucleotide
tccagagatgaaaactgctgctgctgcctggggggggtgctggggaagagagcag

SEQ ID NO: 6741 - DNA, 55 bp, Artificial Sequence
  Synthetic polynucleotide
cctggtgggccatgaacacgcgcacgggcacgggcaccaggttgggctcgcagtg

SEQ ID NO: 6742 - DNA, 55 bp, Artificial Sequence
  Synthetic polynucleotide
gtcgcctggatctggaacacgtcagcgggcgggcacgctccgctccgaggtgatg

SEQ ID NO: 6743 - DNA, 55 bp, Artificial Sequence
  Synthetic polynucleotide
cggcggcggcggcggcggcggcggcggcggcggcgctgctcccgggggcgacggg

SEQ ID NO: 6744 - DNA, 55 bp, Artificial Sequence
  Synthetic polynucleotide
caagtttgtggcccgcaactacctggaacctggtaaagaaagagtgtgtgcagcc

SEQ ID NO: 6745 - DNA, 55 bp, Artificial Sequence
  Synthetic polynucleotide
acggccccgcggtcacgctacctggcgacctggcgcggctcgcggcgtctgggtt

SEQ ID NO: 6746 - DNA, 55 bp, Artificial Sequence
  Synthetic polynucleotide
ctttggggactctgagtggtggtgatgtggtggtgctccttcttggggggtgagg

SEQ ID NO: 6747 - DNA, 55 bp, Artificial Sequence
  Synthetic polynucleotide
ggattctccgtgctctggactcgtgctctcgggctaccaggtggagctgcgaggc

SEQ ID NO: 6748 - DNA, 55 bp, Artificial Sequence
  Synthetic polynucleotide
ctttattatttttggatcctaggtagatgatggagtccgagagagactgtcagag

SEQ ID NO: 6749 - DNA, 55 bp, Artificial Sequence
  Synthetic polynucleotide
tgcggtggggcaggcggcggtgcggcggtgcggcggccgcgtgcagatggtgtgc

SEQ ID NO: 6750 - DNA, 55 bp, Artificial Sequence
  Synthetic polynucleotide
cagaggcagctagcatgaagacggtgaagacggtgaagacggttttctcggtggg

SEQ ID NO: 6751 - DNA, 55 bp, Artificial Sequence
  Synthetic polynucleotide
ccccacggctgcggcaggtgcggctgcagcaggtgcggctgcaggaaggtgagct

SEQ ID NO: 6752 - DNA, 55 bp, Artificial Sequence
  Synthetic polynucleotide
ttttgggacccactacatcacagaggctgtgggctgtgcttgggggcatttatga

SEQ ID NO: 6753 - DNA, 55 bp, Artificial Sequence
  Synthetic polynucleotide
tgcctgcgacgacgacgacgacgacaatgacggagtccctgacagtcgggacaac

SEQ ID NO: 6754 - DNA, 55 bp, Artificial Sequence
  Synthetic polynucleotide
actcatcagacagtgaggaggaagaagaggaggaagaagaggaggaggaagagga

SEQ ID NO: 6755 - DNA, 55 bp, Artificial Sequence
  Synthetic polynucleotide
tccctttggtgacgtgggctgggccgggccgggcccaggaagtgaggcggcgctg

SEQ ID NO: 6756 - DNA, 55 bp, Artificial Sequence
  Synthetic polynucleotide
aggcgcaagttgcgcacggggtcccggcccgggagcgatacactgcctccccggt

SEQ ID NO: 6757 - DNA, 55 bp, Artificial Sequence
  Synthetic polynucleotide
tgtgtcccttcaccaatcccagttggtgcttggtgcttcctatgaatggcagagc

SEQ ID NO: 6758 - DNA, 55 bp, Artificial Sequence
  Synthetic polynucleotide
ctcctcctcctccgctcggcgcggcggcggcggcggcggcggcggccattttccg

SEQ ID NO: 6759 - DNA, 55 bp, Artificial Sequence
  Synthetic polynucleotide
ccagacagtcatctaactgaagaggctttgaggctttgaaagtttcagctgctcc

SEQ ID NO: 6760 - DNA, 55 bp, Artificial Sequence
  Synthetic polynucleotide
cagcagcagcagcagcagcagcagcagcagcggcggcggcggcagctcctccaca

SEQ ID NO: 6761 - DNA, 55 bp, Artificial Sequence
  Synthetic polynucleotide
ctgtgtccttacggctgtggagctgacctgtggagctgacctttagcctgacggt

SEQ ID NO: 6762 - DNA, 55 bp, Artificial Sequence
  Synthetic polynucleotide
gagcctggtcccagcgcagcgcagcgcagccggacgcgtctgccggccccctggc

SEQ ID NO: 6763 - DNA, 55 bp, Artificial Sequence
  Synthetic polynucleotide
ggaagtgctctggacgtagtcgccatgccatggaggtaactggaatgatacgcgc

SEQ ID NO: 6764 - DNA, 55 bp, Artificial Sequence
  Synthetic polynucleotide
accaatcattttggtgcatgaggatgcatgaggacatacccatgaaaactgcaga

SEQ ID NO: 6765 - DNA, 55 bp, Artificial Sequence
  Synthetic polynucleotide
aaagtctggatctaaaaattgctgaagtgaaggggctcccgtggctggtaaatct

SEQ ID NO: 6766 - DNA, 55 bp, Artificial Sequence
  Synthetic polynucleotide
acccattcgctcgtataagccaatgttggttggcgttgctcgtctcggggatttc

SEQ ID NO: 6767 - DNA, 55 bp, Artificial Sequence
  Synthetic polynucleotide
tggtggcccagcgaagatgcgaagatgcgaaggtgatttccgggtgggactgagc

SEQ ID NO: 6768 - DNA, 55 bp, Artificial Sequence
  Synthetic polynucleotide
ggcgaggccggcggcgggctcgggctgcggcgggctcgggctgcggcgcggcgct

SEQ ID NO: 6769 - DNA, 55 bp, Artificial Sequence
  Synthetic polynucleotide
gacatctgggcagagctcaggcagaagctgaggcagaagctgatgagtagtggca

SEQ ID NO: 6770 - DNA, 55 bp, Artificial Sequence
  Synthetic polynucleotide
aggcgggtcgggggcggggctgggctgggctggaaggtgagctcgggaacgttgg

SEQ ID NO: 6771 - DNA, 55 bp, Artificial Sequence
  Synthetic polynucleotide
gggtcgcgcaccaggtgcacgatgcgtcgtaggttgagcgcggggtcgctgagca

SEQ ID NO: 6772 - DNA, 55 bp, Artificial Sequence
  Synthetic polynucleotide
taaaatatcaccttgtgatgttagttagtttggaaacttcagatatatgtaaatg

SEQ ID NO: 6773 - DNA, 55 bp, Artificial Sequence
  Synthetic polynucleotide
cccgcggtggtctctgcctgcaggatgagcaggatgagcatcatggcctccagct

SEQ ID NO: 6774 - DNA, 55 bp, Artificial Sequence
  Synthetic polynucleotide
cagcaggccctccagaagaagctgaagggggggacagaggatgaggtggaaaagt

SEQ ID NO: 6775 - DNA, 55 bp, Artificial Sequence
  Synthetic polynucleotide
gtccaagggtagaccaccagcagccgcctaagggtgggaaaatagaccaataggc

SEQ ID NO: 6776 - DNA, 55 bp, Artificial Sequence
  Synthetic polynucleotide
aagaggtgaagagtccagtgaaatggaaaatggagcaaatttcaatcattgaaag

SEQ ID NO: 6777 - DNA, 55 bp, Artificial Sequence
  Synthetic polynucleotide
cagaggtgttggcagtggtggcatgaggggtggcatgaggaatagtgacaggcac

SEQ ID NO: 6778 - DNA, 55 bp, Artificial Sequence
  Synthetic polynucleotide
agcgccctgttctgaaggcaggtgcaaggcaggtgcagcatggctggcttcccca

SEQ ID NO: 6779 - DNA, 55 bp, Artificial Sequence
  Synthetic polynucleotide
agctgaagaagacatggctcacacggcacatggctcacacggcactcggagcagt

SEQ ID NO: 6780 - DNA, 55 bp, Artificial Sequence
  Synthetic polynucleotide
ggggaggccacggtggctgagctggatggatggactggagccagatactgagtat

SEQ ID NO: 6781 - DNA, 55 bp, Artificial Sequence
  Synthetic polynucleotide
ttactttacttcccttaggaaaaaaagacaaggaaaaaaagacaaagaaaaaaaa

SEQ ID NO: 6782 - DNA, 55 bp, Artificial Sequence
  Synthetic polynucleotide
tggccccgactgcaaggacaaatctgactgaggaggaaaactgcggtatgggcgg

SEQ ID NO: 6783 - DNA, 55 bp, Artificial Sequence
  Synthetic polynucleotide
atgagcataactcaggaagaagagaagagctggttgttggtgaatgtgatgcctg

SEQ ID NO: 6784 - DNA, 55 bp, Artificial Sequence
  Synthetic polynucleotide
tggtgtccttcttcacctctccttttaggaaggcttctattgtggctgaggccta

SEQ ID NO: 6785 - DNA, 55 bp, Artificial Sequence
  Synthetic polynucleotide
agctaagaaagagcagcggcagaaaaacagcggcagaaaaactttgtggacctgg

SEQ ID NO: 6786 - DNA, 55 bp, Artificial Sequence
  Synthetic polynucleotide
ggtctcccaggggcagccgggcacgaaggtgggcagccgggcacgaaggtggcca

SEQ ID NO: 6787 - DNA, 55 bp, Artificial Sequence
  Synthetic polynucleotide
caattggtccaccatgttcttcaggctggctggctggcaggtaatgggagtatag

SEQ ID NO: 6788 - DNA, 55 bp, Artificial Sequence
  Synthetic polynucleotide
tgcgttgcagctggggctgcgttgcagctggggctgcgggcggcggggctgggac

SEQ ID NO: 6789 - DNA, 55 bp, Artificial Sequence
  Synthetic polynucleotide
cccccagggcactgtctgaagagctggagctggagctggaattattaccgaattg

SEQ ID NO: 6790 - DNA, 55 bp, Artificial Sequence
  Synthetic polynucleotide
cagtttctggcaggcctcgtgactttttgcaggcctcgtgactttttgcagcaac

SEQ ID NO: 6791 - DNA, 55 bp, Artificial Sequence
  Synthetic polynucleotide
ataccttggcaagatcatacagacagagagaggacctgtcgacagtagttcttcc

SEQ ID NO: 6792 - DNA, 55 bp, Artificial Sequence
  Synthetic polynucleotide
catgtgctcacgtgtgcaatacaggtggtaaggccccctccacccattagcaagc

SEQ ID NO: 6793 - DNA, 55 bp, Artificial Sequence
  Synthetic polynucleotide
ttcagcctcttttttccacttctggatcagaggatcagagtttattctaaattca

SEQ ID NO: 6794 - DNA, 55 bp, Artificial Sequence
  Synthetic polynucleotide
tgctatggagaaggggaaattgcacaagccgggaaattgcacaagccaggaaagg

SEQ ID NO: 6795 - DNA, 55 bp, Artificial Sequence
  Synthetic polynucleotide
agcagggagccagcagaccagggccccaccagggccccgggatgcccaggcacac

SEQ ID NO: 6796 - DNA, 55 bp, Artificial Sequence
  Synthetic polynucleotide
tgtgctactagaactcaaaacactggctgttggctgtttcatggtccattcgtgt

SEQ ID NO: 6797 - DNA, 55 bp, Artificial Sequence
  Synthetic polynucleotide
gaccccaatgatgataccacaggattgggtgggagcagagggtggaggaggtgca

SEQ ID NO: 6798 - DNA, 55 bp, Artificial Sequence
  Synthetic polynucleotide
gacttctcttggtttggttgtcagggccccgggcccccgtggcctgcctggtgag

SEQ ID NO: 6799 - DNA, 55 bp, Artificial Sequence
  Synthetic polynucleotide
ggcctggtaccggccagccagccccggtaccggccagccagccccgaaagcctgc

SEQ ID NO: 6800 - DNA, 55 bp, Artificial Sequence
  Synthetic polynucleotide
aatgctgtaggattcccatcaaacaaacagtggtcaaggactaatgcaccagcag

SEQ ID NO: 6801 - DNA, 55 bp, Artificial Sequence
  Synthetic polynucleotide
gctgcatcttttgccaaagctgttagggttaggtcacttcctgagtatccatcag

SEQ ID NO: 6802 - DNA, 55 bp, Artificial Sequence
  Synthetic polynucleotide
taaaaaatttaaggttcttaaagatgatgtgggattgaaaaaagaagatattgca

SEQ ID NO: 6803 - DNA, 55 bp, Artificial Sequence
  Synthetic polynucleotide
ccagctctcctgggtttgaaggatgcgatgcggtacagctgcttcagctgagcaa

SEQ ID NO: 6804 - DNA, 55 bp, Artificial Sequence
  Synthetic polynucleotide
tctgattccagaatagcttctctatctatctggtaggggaaaatgatattaaata

SEQ ID NO: 6805 - DNA, 55 bp, Artificial Sequence
  Synthetic polynucleotide
gtcagggttccacagaaacatgtacagtacagggccacttctagtttggtctggg

SEQ ID NO: 6806 - DNA, 55 bp, Artificial Sequence
  Synthetic polynucleotide
ggagggcagcgcggggaactggcgcggcgcgggtcgctgaacgctgtcaggtcgg

SEQ ID NO: 6807 - DNA, 55 bp, Artificial Sequence
  Synthetic polynucleotide
tgaggtatgccatgccgtctgcaatctctccggccgtctgcaatctctccggcca

SEQ ID NO: 6808 - DNA, 55 bp, Artificial Sequence
  Synthetic polynucleotide
acattttaaatgtaacaatcttctctggcgtggcgctctagaggagaaagggaca

SEQ ID NO: 6809 - DNA, 55 bp, Artificial Sequence
  Synthetic polynucleotide
tccacgtcgccccggggccgccgacccacccgggctggagagggggatgttgagg

SEQ ID NO: 6810 - DNA, 55 bp, Artificial Sequence
  Synthetic polynucleotide
gtcaccctgacgaatctcatctcacctcactggtaagctacccccaccctcatct

SEQ ID NO: 6811 - DNA, 55 bp, Artificial Sequence
  Synthetic polynucleotide
cgtgggaccatgccaggcacaaaacggtttcggtttcaacatgtcattgagaccc

SEQ ID NO: 6812 - DNA, 55 bp, Artificial Sequence
  Synthetic polynucleotide
ctgagccacctttggaagatgagccacctttggaagagctgggctaccacatcta

SEQ ID NO: 6813 - DNA, 55 bp, Artificial Sequence
  Synthetic polynucleotide
aagtttgcaccataagacttggacttgacttgggttttggaaccttcctctcttc

SEQ ID NO: 6814 - DNA, 55 bp, Artificial Sequence
  Synthetic polynucleotide
caggtccatgaaaaagcagatgacttgggtgggcaaaggtggaaatgaagaaagt

SEQ ID NO: 6815 - DNA, 55 bp, Artificial Sequence
  Synthetic polynucleotide
gagccacaccaggctgctgcggccctgctgcggccctgctgcgcctgcatggcgg

SEQ ID NO: 6816 - DNA, 55 bp, Artificial Sequence
  Synthetic polynucleotide
acaggatctgctgggatgctgggccccgctgggccccacttgaaacggttcctcc

SEQ ID NO: 6817 - DNA, 55 bp, Artificial Sequence
  Synthetic polynucleotide
ccccacagggtggagggtggaacgtggtggagggtggaacgtgcggctgcgtgga

SEQ ID NO: 6818 - DNA, 55 bp, Artificial Sequence
  Synthetic polynucleotide
agagagttctgctacgcggtggaggcagggtggaggcagcgtatgtgaccccagt

SEQ ID NO: 6819 - DNA, 55 bp, Artificial Sequence
  Synthetic polynucleotide
gctcgccggctcccggccaccctggtcccctggtccccgggccccgtacctctcc

SEQ ID NO: 6820 - DNA, 55 bp, Artificial Sequence
  Synthetic polynucleotide
agctactattttcccctcaaaacatcattgtggcgttcattctttgctgccttgg

SEQ ID NO: 6821 - DNA, 55 bp, Artificial Sequence
  Synthetic polynucleotide
ctgctgcagcggctggcagacggggccagacggggccatcgacctctatgccatg

SEQ ID NO: 6822 - DNA, 55 bp, Artificial Sequence
  Synthetic polynucleotide
atgctggtgaaggtgggagaaggtgagagaaggtgaggaggggcagtggagcgtg

SEQ ID NO: 6823 - DNA, 55 bp, Artificial Sequence
  Synthetic polynucleotide
tagaacatatcatctggacccttttccatctggacccttttccagcacaccctgc

SEQ ID NO: 6824 - DNA, 55 bp, Artificial Sequence
  Synthetic polynucleotide
caagaacctcaattttcttgttcatggcggcggcaatttcctgctccaggttctc

SEQ ID NO: 6825 - DNA, 55 bp, Artificial Sequence
  Synthetic polynucleotide
gtagttgatttataccctgatagagtcggtcggtaacaatcttgtaagtttgctg

SEQ ID NO: 6826 - DNA, 55 bp, Artificial Sequence
  Synthetic polynucleotide
tagaactcaaaacactggctgtttcatgcatggtccattcgtgtagttgaaccct

SEQ ID NO: 6827 - DNA, 55 bp, Artificial Sequence
  Synthetic polynucleotide
ccccgtggtgcggtggggcaggcggcggtgcggtggggcaggcggcggtgcggcg

SEQ ID NO: 6828 - DNA, 55 bp, Artificial Sequence
  Synthetic polynucleotide
atcgcggtggggtgtggaaggagtcgccgccggggcctcccagccgcagggcggg

SEQ ID NO: 6829 - DNA, 55 bp, Artificial Sequence
  Synthetic polynucleotide
gggtgtgcagctgcaggacaacggcaggacaggacgtgtaaggcaggtgaggcgg

SEQ ID NO: 6830 - DNA, 55 bp, Artificial Sequence
  Synthetic polynucleotide
caaacttcggggggcggcggcggcggccggcggcaaccagaaaaacagcccggac

SEQ ID NO: 6831 - DNA, 55 bp, Artificial Sequence
  Synthetic polynucleotide
cgaaactggagagggcgatggcgaaggcgaaggcctgcagggcgcacagcgggta

SEQ ID NO: 6832 - DNA, 55 bp, Artificial Sequence
  Synthetic polynucleotide
gccggagccccgctcccggtgccccgctcccggtgccccggggtcccagtgcagg

SEQ ID NO: 6833 - DNA, 55 bp, Artificial Sequence
  Synthetic polynucleotide
gctcaccgggttccgggctaaagaagcccccgggctaaagaagcccccgcgctcc

SEQ ID NO: 6834 - DNA, 55 bp, Artificial Sequence
  Synthetic polynucleotide
ggtgatcgtggccatcatcatcatcatcagcgggctggtgctcctggcccaaggt

SEQ ID NO: 6835 - DNA, 55 bp, Artificial Sequence
  Synthetic polynucleotide
ccagcgctcctagtggccatgcacgtcacgtggcctaccggagacatgagaagaa

SEQ ID NO: 6836 - DNA, 55 bp, Artificial Sequence
  Synthetic polynucleotide
gagacagtctgcgtggtaaacttttgggcgtggtaaacttttgggcagcctggtt

SEQ ID NO: 6837 - DNA, 55 bp, Artificial Sequence
  Synthetic polynucleotide
cttactatatggttctttgagcaaccaacatgggaggtgagagtttaataaaata

SEQ ID NO: 6838 - DNA, 55 bp, Artificial Sequence
  Synthetic polynucleotide
tcgtggctgcgcaccaggaactcggcttctcggcttggtatggcagcagggggcc

SEQ ID NO: 6839 - DNA, 55 bp, Artificial Sequence
  Synthetic polynucleotide
agccagctctgcgtgaacctggagggtgggtggctacaagtgccagtgtgaggaa

SEQ ID NO: 6840 - DNA, 55 bp, Artificial Sequence
  Synthetic polynucleotide
gctgctgcagacccactggacactggacactggacaagtacgggatcctggccga

SEQ ID NO: 6841 - DNA, 55 bp, Artificial Sequence
  Synthetic polynucleotide
attgctagcaccaggaagtcttggaagtcttggctgcccatgatttgatttacag

SEQ ID NO: 6842 - DNA, 55 bp, Artificial Sequence
  Synthetic polynucleotide
gtggtctccccagtggctgggctgcgggtcgggtcatctaccctgccccccgcga

SEQ ID NO: 6843 - DNA, 55 bp, Artificial Sequence
  Synthetic polynucleotide
tgctgctgctgttgcgcagccaccggacaccgggctcacgtcgctcattttgccg

SEQ ID NO: 6844 - DNA, 55 bp, Artificial Sequence
  Synthetic polynucleotide
gacctgtgatctcgctggctgcagggctgcagggctgcaggccttccccggagcc

SEQ ID NO: 6845 - DNA, 55 bp, Artificial Sequence
  Synthetic polynucleotide
agtggaaatcgccttctaccggaaagatgatggtaggagcgggccggggcggggc

SEQ ID NO: 6846 - DNA, 55 bp, Artificial Sequence
  Synthetic polynucleotide
ccagctccgacgacggcagctctccgacgacggcagctggggagccaaggaagtt

SEQ ID NO: 6847 - DNA, 55 bp, Artificial Sequence
  Synthetic polynucleotide
ttgctgataatggaggcctgcgggaagcttgggaagcttttagggtatgcgctgc

SEQ ID NO: 6848 - DNA, 55 bp, Artificial Sequence
  Synthetic polynucleotide
agctcagcgaggtcggcgtggaggcggcggcggcggccaccagcattgccatgtc

SEQ ID NO: 6849 - DNA, 55 bp, Artificial Sequence
  Synthetic polynucleotide
tgtacttctggaagcctctgggctcgggctcggactcggatctggtgcttctccc

SEQ ID NO: 6850 - DNA, 55 bp, Artificial Sequence
  Synthetic polynucleotide
ctttgacccttcacccctggatatatgtatgggcagcagtacaccttcttcaggt

SEQ ID NO: 6851 - DNA, 55 bp, Artificial Sequence
  Synthetic polynucleotide
aaggccttcgtgctgagcagtgtggaagtgtggatgagctggagcagcaaaggga

SEQ ID NO: 6852 - DNA, 55 bp, Artificial Sequence
  Synthetic polynucleotide
ttaaatagcattggatacagagcagggagcaggactcaattctagacccaccaga

SEQ ID NO: 6853 - DNA, 55 bp, Artificial Sequence
  Synthetic polynucleotide
cccagcgcgtgtggccctgcccggcgcgtgtggccctgcccggcgtggacgtgag

SEQ ID NO: 6854 - DNA, 55 bp, Artificial Sequence
  Synthetic polynucleotide
aattggaaattttcaagcttttgatgaatgaggacactggactaccagcccatgc

SEQ ID NO: 6855 - DNA, 55 bp, Artificial Sequence
  Synthetic polynucleotide
tcgggagaggagctggacttgctcaggagctggacttgctcaggggctgcgaggg

SEQ ID NO: 6856 - DNA, 55 bp, Artificial Sequence
  Synthetic polynucleotide
tgaggccgccaggcgggtcgggggcggggcggggctgggctggaaggtgagctcg

SEQ ID NO: 6857 - DNA, 55 bp, Artificial Sequence
  Synthetic polynucleotide
ttttaaagtagtagtgattggctgattgataggagaccttggaaggattggaagc

SEQ ID NO: 6858 - DNA, 55 bp, Artificial Sequence
  Synthetic polynucleotide
cgggcttcacacgccggcatctcaggccgccggcatctcaggccaccaccctcca

SEQ ID NO: 6859 - DNA, 55 bp, Artificial Sequence
  Synthetic polynucleotide
cattcagtggcttggacaccgtcaggtgtcaggtccctgggggcagaagagatat

SEQ ID NO: 6860 - DNA, 55 bp, Artificial Sequence
  Synthetic polynucleotide
tcctcgccccacggctcctcggcctcgcctcggcctctcggctcactatgcgcac

SEQ ID NO: 6861 - DNA, 55 bp, Artificial Sequence
  Synthetic polynucleotide
cccagcacgcagagtggaaggccaggcaggtggaaggccaggcactatggaacag

SEQ ID NO: 6862 - DNA, 55 bp, Artificial Sequence
  Synthetic polynucleotide
cgggtcctgtgccgggagacggggctgctggggctgctggccctgcactcggccg

SEQ ID NO: 6863 - DNA, 55 bp, Artificial Sequence
  Synthetic polynucleotide
tgagaaagttggccttccgctacagacagacgggtaaaagagatctacaacacct

SEQ ID NO: 6864 - DNA, 55 bp, Artificial Sequence
  Synthetic polynucleotide
cgccgccgcccccgaggtccgctgctcccgaggtccgctgctgtgtggatgccgt

SEQ ID NO: 6865 - DNA, 55 bp, Artificial Sequence
  Synthetic polynucleotide
cgctggagcttctgcagctgcagctgcagcaggtgagggctgagccaatggggca

SEQ ID NO: 6866 - DNA, 55 bp, Artificial Sequence
  Synthetic polynucleotide
ctgcttgtgacatttgtggcaaaacatttgcggcaaaacatttgcttgtcagagt

SEQ ID NO: 6867 - DNA, 55 bp, Artificial Sequence
  Synthetic polynucleotide
acgggatgctgttggcaccaggcacggacgggggcagggagtgcatccgcgctcc

SEQ ID NO: 6868 - DNA, 55 bp, Artificial Sequence
  Synthetic polynucleotide
ttctggccctcctggtccccctggtccccctggtcctgctgggaaagaagggctt

SEQ ID NO: 6869 - DNA, 55 bp, Artificial Sequence
  Synthetic polynucleotide
gcgcccagccgaatgcgcgaagcagggcgtgggcgtagagggcatccgcggcggg

SEQ ID NO: 6870 - DNA, 55 bp, Artificial Sequence
  Synthetic polynucleotide
cagtcccagtgtcacagacacagatccatccggcagggctccggcttccacacat

SEQ ID NO: 6871 - DNA, 55 bp, Artificial Sequence
  Synthetic polynucleotide
tatgaggtttgtctccagccttgtctgtctgggtcccatcgatagatggcaaatt

SEQ ID NO: 6872 - DNA, 55 bp, Artificial Sequence
  Synthetic polynucleotide
tcggcggatggacgcgctctcgtaggtggtgggcaccagtcttcgatggagcctg

SEQ ID NO: 6873 - DNA, 55 bp, Artificial Sequence
  Synthetic polynucleotide
acagcctggaggagccatccagcaggaagcaggaagaccaggtccagtagcctgc

SEQ ID NO: 6874 - DNA, 55 bp, Artificial Sequence
  Synthetic polynucleotide
gaaggaggcaatgtatatgcaactggttggtggaaataatgaaggacagttgggg

SEQ ID NO: 6875 - DNA, 55 bp, Artificial Sequence
  Synthetic polynucleotide
acgtgtccctataaacatacggaggagtcgaggagtcggcggcgcgtaaggacag

SEQ ID NO: 6876 - DNA, 55 bp, Artificial Sequence
  Synthetic polynucleotide
ccaaggcgcccacctggatgagacggtccctggatgagacggtctgggagaggcc

SEQ ID NO: 6877 - DNA, 55 bp, Artificial Sequence
  Synthetic polynucleotide
tgtgcctcttctgttccaggtagtggtgatcggtgatcttcctttttctgggctt

SEQ ID NO: 6878 - DNA, 55 bp, Artificial Sequence
  Synthetic polynucleotide
ctttttttattttttccatataagataagatggagacggtcttttcttgtgagtc

SEQ ID NO: 6879 - DNA, 55 bp, Artificial Sequence
  Synthetic polynucleotide
atgctgtgggtgctggcacctgagccgtgctggcacctgagccgtgctgccacct

SEQ ID NO: 6880 - DNA, 55 bp, Artificial Sequence
  Synthetic polynucleotide
cccagagcgcgtgggagcaggaggcctgcctggatggctacagcgtggagtactg

SEQ ID NO: 6881 - DNA, 55 bp, Artificial Sequence
  Synthetic polynucleotide
aggaggaggtggtgcggcgggaggaggcggcgggaggaggcggcggtggacgcgc

SEQ ID NO: 6882 - DNA, 55 bp, Artificial Sequence
  Synthetic polynucleotide
cctcggtaggtcttggacggcggccggccgagggtagacccttcccagccctaac

SEQ ID NO: 6883 - DNA, 55 bp, Artificial Sequence
  Synthetic polynucleotide
tggaggcccggcacgcggtgctggctctgctggctctgctgaaggccatcgtgca

SEQ ID NO: 6884 - DNA, 55 bp, Artificial Sequence
  Synthetic polynucleotide
ctgtggctggaagggcagtggtgagcaagcaggatcggctgagggccaaactgct

SEQ ID NO: 6885 - DNA, 55 bp, Artificial Sequence
  Synthetic polynucleotide
tgcttatctggtgatccggagatcggagatcggcaggactgaggtattcaccgag

SEQ ID NO: 6886 - DNA, 55 bp, Artificial Sequence
  Synthetic polynucleotide
ggtatcccggtatgtcaactggattgattaaggaaaaaacaaagctcacttaatg

SEQ ID NO: 6887 - DNA, 55 bp, Artificial Sequence
  Synthetic polynucleotide
tctgtgcagtgacgagactatctggctggctggagcctgaagttctcttttcagg

SEQ ID NO: 6888 - DNA, 55 bp, Artificial Sequence
  Synthetic polynucleotide
cacaaagaactatagagtgtggtataaatgcggtataaatgcacatgtgcttatc

SEQ ID NO: 6889 - DNA, 55 bp, Artificial Sequence
  Synthetic polynucleotide
ttcctgtgaggcacgaagacatcgataataaggtgggccgggtggaggggcagaa

SEQ ID NO: 6890 - DNA, 55 bp, Artificial Sequence
  Synthetic polynucleotide
gaggaaacctcagaaaaagtagaaaaaaaatggaagtctatgtgatcaagaaatc

SEQ ID NO: 6891 - DNA, 55 bp, Artificial Sequence
  Synthetic polynucleotide
gatttttgcaaatggatcttacagggttacagggttacaggtgatttaggtaact

SEQ ID NO: 6892 - DNA, 55 bp, Artificial Sequence
  Synthetic polynucleotide
ggtcgggcggcgcgggcggcgcgggcggcgcgggcggcgcgggcgccccgggggc

SEQ ID NO: 6893 - DNA, 55 bp, Artificial Sequence
  Synthetic polynucleotide
ccacagcagcggtagcagcagcagcagcagcggcagcagccgcagcccggagggc

SEQ ID NO: 6894 - DNA, 55 bp, Artificial Sequence
  Synthetic polynucleotide
ctcagatgctttcaggatgagactggagactggactctcccagctcgctgtgcag

SEQ ID NO: 6895 - DNA, 55 bp, Artificial Sequence
  Synthetic polynucleotide
gccagagggttcagactcaggatggatggatggatgctcatacacggcagccaca

SEQ ID NO: 6896 - DNA, 55 bp, Artificial Sequence
  Synthetic polynucleotide
cagggggtaaagaggcgctaccaggcgggcgggcgggccacggcgcttctgtacc

SEQ ID NO: 6897 - DNA, 55 bp, Artificial Sequence
  Synthetic polynucleotide
ggaaattgatagaagcagaagatagaagatcggctataaaaaagataatggaaag

SEQ ID NO: 6898 - DNA, 55 bp, Artificial Sequence
  Synthetic polynucleotide
tgcccgtgattctcatggatgagacgctcatggatgagacgctcaagtttgtggc

SEQ ID NO: 6899 - DNA, 55 bp, Artificial Sequence
  Synthetic polynucleotide
ttattacttctctttggctatgaaggttgaaggtatgtgctattcaaccattgac

SEQ ID NO: 6900 - DNA, 55 bp, Artificial Sequence
  Synthetic polynucleotide
cctcttcaagagcatctggaacaacagaacaggtttgtggagtgaccgcccaccc

SEQ ID NO: 6901 - DNA, 55 bp, Artificial Sequence
  Synthetic polynucleotide
tccgctacgacctgctggacctcactcgctcggcaggcagtgcaggagctggtca

SEQ ID NO: 6902 - DNA, 55 bp, Artificial Sequence
  Synthetic polynucleotide
ctctgaacgttcttctcatcatcatcatcgtggatgacctgcgcccctccctggg

SEQ ID NO: 6903 - DNA, 55 bp, Artificial Sequence
  Synthetic polynucleotide
acttcgtggactttgtgttccagcagcacagggcagcacagcagcgaggtcccta

SEQ ID NO: 6904 - DNA, 55 bp, Artificial Sequence
  Synthetic polynucleotide
tttaacccactctgtggaagtgctcagcattggcagcattggagtgaatggagcc

SEQ ID NO: 6905 - DNA, 55 bp, Artificial Sequence
  Synthetic polynucleotide
ggccctcctggatttcctggagaaaggggggggtcagaaaggtgatgaaggacca

SEQ ID NO: 6906 - DNA, 55 bp, Artificial Sequence
  Synthetic polynucleotide
acatatgttttattttacttagacatgacatggttagcaaaagactgtcctgctc

SEQ ID NO: 6907 - DNA, 55 bp, Artificial Sequence
  Synthetic polynucleotide
ttataaaagacggaaggccacgactccccccggtcatccacccctgtgaagggaa

SEQ ID NO: 6908 - DNA, 55 bp, Artificial Sequence
  Synthetic polynucleotide
cgaggtcaggaagatgacgctggaccggaccggagcgagtacaccagcctcatcc

SEQ ID NO: 6909 - DNA, 55 bp, Artificial Sequence
  Synthetic polynucleotide
caccaacagcatgaagactgacaggatggatgggaagccatgttcttaagtgtaa

SEQ ID NO: 6910 - DNA, 55 bp, Artificial Sequence
  Synthetic polynucleotide
agacgttgtcgcagcctggctgccgcagcctggctgccgcgtgttgcaagtgaac

SEQ ID NO: 6911 - DNA, 55 bp, Artificial Sequence
  Synthetic polynucleotide
aaagattgctaagacagcacacaaaaaaaatggatcaaccttaaaggaaactgct

SEQ ID NO: 6912 - DNA, 55 bp, Artificial Sequence
  Synthetic polynucleotide
gtgggggaggggctggtccattcccggggctggtccattcccggagctgggcggc

SEQ ID NO: 6913 - DNA, 55 bp, Artificial Sequence
  Synthetic polynucleotide
cgtccatcgtccttcagcagccttcggtgccggtgcacctggggggagagtggcc

SEQ ID NO: 6914 - DNA, 55 bp, Artificial Sequence
  Synthetic polynucleotide
aagagtgctgcgaatgctataatgagtagttgggtgcaaacggatgtatcgagca

SEQ ID NO: 6915 - DNA, 55 bp, Artificial Sequence
  Synthetic polynucleotide
aacatccccctctccagcccgggtcggcggcggccccggggcgacgtggagagca

SEQ ID NO: 6916 - DNA, 55 bp, Artificial Sequence
  Synthetic polynucleotide
cctctttctcctcaaggaacaatcaatcagtggattatagacataagttctcctt

SEQ ID NO: 6917 - DNA, 55 bp, Artificial Sequence
  Synthetic polynucleotide
gcagtggcagacgctgaagcagaacacacacgggcgttgcccactttgagtatca

SEQ ID NO: 6918 - DNA, 55 bp, Artificial Sequence
  Synthetic polynucleotide
tcagctgggctaggtccaggtgctgggtccaggtgctgggagcccacggtatcgt

SEQ ID NO: 6919 - DNA, 55 bp, Artificial Sequence
  Synthetic polynucleotide
gtctgcgagagggtggcgggctgggccaccaggtgcagcagtgcgatgtcattgt

SEQ ID NO: 6920 - DNA, 55 bp, Artificial Sequence
  Synthetic polynucleotide
gcggccgcaaactgacacctcagggacaaagggacaaagagatctggacagaatc

SEQ ID NO: 6921 - DNA, 55 bp, Artificial Sequence
  Synthetic polynucleotide
cccgactgcaaggacaaatctgacactgcaaggacaaatctgacgaggaaaactg

SEQ ID NO: 6922 - DNA, 55 bp, Artificial Sequence
  Synthetic polynucleotide
ggcctttaaaatatggtgctctttaaaacatggtgctctccagccacccaattct

SEQ ID NO: 6923 - DNA, 55 bp, Artificial Sequence
  Synthetic polynucleotide
caaggtcccaaagggcgcactgctgctgctcggcccccccggctgtgggaagacg

SEQ ID NO: 6924 - DNA, 55 bp, Artificial Sequence
  Synthetic polynucleotide
tccgcctgaagctgcccgcgctgctgctgctggcgctgacggcccgggagtcgtc

SEQ ID NO: 6925 - DNA, 55 bp, Artificial Sequence
  Synthetic polynucleotide
gcagcagcagtggtggatgtggcggagaggaggaagaggaggagaatgaggacct

SEQ ID NO: 6926 - DNA, 55 bp, Artificial Sequence
  Synthetic polynucleotide
cctgcaccttatccaagtaagagaagtaagaggccagccgagaattgagttcctg

SEQ ID NO: 6927 - DNA, 55 bp, Artificial Sequence
  Synthetic polynucleotide
tccagcccgggtcggcggccccggggcgacgggcgacgtggagagcaggctggat

SEQ ID NO: 6928 - DNA, 55 bp, Artificial Sequence
  Synthetic polynucleotide
tttaatcttaattggaggcctgactcactcaggggtaaataccatgtccccactg

SEQ ID NO: 6929 - DNA, 55 bp, Artificial Sequence
  Synthetic polynucleotide
cccctttgacgggggcatctatgtctgcgggggcatctatgtctgcagggccacc

SEQ ID NO: 6930 - DNA, 55 bp, Artificial Sequence
  Synthetic polynucleotide
ccgcaggggtgaactcggcggggaggtgctcggcggggaggtgggcggccagggt

SEQ ID NO: 6931 - DNA, 55 bp, Artificial Sequence
  Synthetic polynucleotide
gtggtgccaatcagtggatcaagtttacagtggatcaagtttaagtcagtcagtt

SEQ ID NO: 6932 - DNA, 55 bp, Artificial Sequence
  Synthetic polynucleotide
ataccccaaggttatggataaatatgaatatggagagttctacggccgagacaga

SEQ ID NO: 6933 - DNA, 55 bp, Artificial Sequence
  Synthetic polynucleotide
caccatcctctgtttttgctgtaggttttgaggttttgccatttctcgctcttgg

SEQ ID NO: 6934 - DNA, 55 bp, Artificial Sequence
  Synthetic polynucleotide
cccgggtggccgcggcgctggacgacggcgcggcgctggacgacggctcggccct

SEQ ID NO: 6935 - DNA, 55 bp, Artificial Sequence
  Synthetic polynucleotide
ctagggtgctcctggtgctgtaggtgctcatggtgctgtaggtgcccctggtcct

SEQ ID NO: 6936 - DNA, 55 bp, Artificial Sequence
  Synthetic polynucleotide
ctgcatcgctgaaagggccttcctgaggaaagggccttcctgaggcacctggtag

SEQ ID NO: 6937 - DNA, 55 bp, Artificial Sequence
  Synthetic polynucleotide
aacagaggcatgaccgccttactgaaatgaaggtttctagttgtgacaagaacac

SEQ ID NO: 6938 - DNA, 55 bp, Artificial Sequence
  Synthetic polynucleotide
gtacacaccgatgatgaagcggcccagaagcggcccaggatcagcatctcaaagg

SEQ ID NO: 6939 - DNA, 55 bp, Artificial Sequence
  Synthetic polynucleotide
gtaggtgcctttggacagcagattcacgaagggctgcagattcacgaagggctgc

SEQ ID NO: 6940 - DNA, 55 bp, Artificial Sequence
  Synthetic polynucleotide
ctcatttcacctgcgctgtggacactgctgtggacactgagaacatccgccgtgt

SEQ ID NO: 6941 - DNA, 55 bp, Artificial Sequence
  Synthetic polynucleotide
gggtgttgcggacggcgacggtgtagtggacggcgatggtgtagtggtcgtgggc

SEQ ID NO: 6942 - DNA, 55 bp, Artificial Sequence
  Synthetic polynucleotide
tgccaacagaagcgatcaggatgaccaccacgggcacggcactgagcttgattcc

SEQ ID NO: 6943 - DNA, 55 bp, Artificial Sequence
  Synthetic polynucleotide
gcgggtgggcgacagcggagtggagctggctggcctgcgccccgctgcgggtggc

SEQ ID NO: 6944 - DNA, 55 bp, Artificial Sequence
  Synthetic polynucleotide
cgaggttcgctacctggtgcgggaggagggaggaccgctaccgcgctgccctggc

SEQ ID NO: 6945 - DNA, 55 bp, Artificial Sequence
  Synthetic polynucleotide
ctgagtgcctgcaggctgacgagtgcctgcaggctgacatctgcctgcacctgaa

SEQ ID NO: 6946 - DNA, 55 bp, Artificial Sequence
  Synthetic polynucleotide
taggcggccgcggcggtggctgctggatactggatacgggaagcctggcactgcg

SEQ ID NO: 6947 - DNA, 55 bp, Artificial Sequence
  Synthetic polynucleotide
gtgtcggtatgatcttgtcctgatggaaaacggaaaacgttgaaacagtcttcca

SEQ ID NO: 6948 - DNA, 55 bp, Artificial Sequence
  Synthetic polynucleotide
agtttccaaactaacatcacaaggtgatcaaggtgatattttagaaactttctcc

SEQ ID NO: 6949 - DNA, 55 bp, Artificial Sequence
  Synthetic polynucleotide
gagctttctgttgctactctcagaaagaaagggaacttttccaggtctgtttgct

SEQ ID NO: 6950 - DNA, 55 bp, Artificial Sequence
  Synthetic polynucleotide
cactacttagcctgtgcaccatgtgtaggtaggtagtcctcacttgaaccatgtc

SEQ ID NO: 6951 - DNA, 55 bp, Artificial Sequence
  Synthetic polynucleotide
ctaccgggggactttaggcagaggctgggctggctataaatggagcttgactcga

SEQ ID NO: 6952 - DNA, 55 bp, Artificial Sequence
  Synthetic polynucleotide
tgaataaaggattttggctttctgtatgtatggcttcggtgtcccgccttctact

SEQ ID NO: 6953 - DNA, 55 bp, Artificial Sequence
  Synthetic polynucleotide
cctactttcccgtggccgacctgtctatcgtggccgacctgtctatcatcgccgc

SEQ ID NO: 6954 - DNA, 55 bp, Artificial Sequence
  Synthetic polynucleotide
ggctccaacctgtgatgaagctgaaggaagagggactggatgtgggcccgatcct

SEQ ID NO: 6955 - DNA, 55 bp, Artificial Sequence
  Synthetic polynucleotide
gtgggtttttaaaaatcgttttagggttttagggtcttactacggagcacatttg

SEQ ID NO: 6956 - DNA, 55 bp, Artificial Sequence
  Synthetic polynucleotide
tgtatgtggacaagaccgaacactacttactggccagcatcctactgaggatttt

SEQ ID NO: 6957 - DNA, 55 bp, Artificial Sequence
  Synthetic polynucleotide
tggtggaggtggaggtggaggtggaggtggaggtgagatgtcttcagctttgtct

SEQ ID NO: 6958 - DNA, 55 bp, Artificial Sequence
  Synthetic polynucleotide
cggccgccgaagcccagcgcgcaggagcagcggtgcgcgcaggagcagcggtgcg

SEQ ID NO: 6959 - DNA, 55 bp, Artificial Sequence
  Synthetic polynucleotide
tcctttttgcccagggggtccttgaatgaatggctccataagctgcaaaagcaag

SEQ ID NO: 6960 - DNA, 55 bp, Artificial Sequence
  Synthetic polynucleotide
ggagtgcgtggagaggctgccggacaggacagggggttggccgcggggttacagg

SEQ ID NO: 6961 - DNA, 55 bp, Artificial Sequence
  Synthetic polynucleotide
ggccaccaagggctgccttcgggccgccttcgggccctggccatgaagttcaaga

SEQ ID NO: 6962 - DNA, 55 bp, Artificial Sequence
  Synthetic polynucleotide
cgatggcggcggcggcggcggcggcagcagcggcagcagcagcgggggctgcggg

SEQ ID NO: 6963 - DNA, 55 bp, Artificial Sequence
  Synthetic polynucleotide
tgatggtggccccgactgcaaggacaaatctggacaaatctgacgaggaaaactg

SEQ ID NO: 6964 - DNA, 55 bp, Artificial Sequence
  Synthetic polynucleotide
tcgaggccgaggaggaggaggaggaggaggtggaaggggaagaaggcggaatggt

SEQ ID NO: 6965 - DNA, 55 bp, Artificial Sequence
  Synthetic polynucleotide
gcggcgcgatggcggcggggctggcgcggctggcgcggctcctgttgctcctcgg

SEQ ID NO: 6966 - DNA, 55 bp, Artificial Sequence
  Synthetic polynucleotide
tcctggccctgctcagcatctgtcagtcagtggagaccacaggccctgctgcggt

SEQ ID NO: 6967 - DNA, 55 bp, Artificial Sequence
  Synthetic polynucleotide
cgcccctcacctttcggcaaggcttcgacgaggcttcgacgagacctcgaaggag

SEQ ID NO: 6968 - DNA, 55 bp, Artificial Sequence
  Synthetic polynucleotide
actgctgacctgcccctactgcgaccgaccggggctacaagcgcttgacatcact

SEQ ID NO: 6969 - DNA, 55 bp, Artificial Sequence
  Synthetic polynucleotide
agagcttgatgaggctgttctcaggatggtagggagatttatatggaaatacatg

SEQ ID NO: 6970 - DNA, 55 bp, Artificial Sequence
  Synthetic polynucleotide
cgactcgatgaaggtgatctcgcagctagctgggcgtcagcctgcgcacgctggc

SEQ ID NO: 6971 - DNA, 55 bp, Artificial Sequence
  Synthetic polynucleotide
ctgcgcctgcccggacggcatgctgcttgctggccagggacatgaggagctgcct

SEQ ID NO: 6972 - DNA, 55 bp, Artificial Sequence
  Synthetic polynucleotide
acggggaccggcgggaccagcaggaccagcaggaccagcgttaccaacagctcca

SEQ ID NO: 6973 - DNA, 55 bp, Artificial Sequence
  Synthetic polynucleotide
tgtcatttatccatttcctgtaagcaagcctggtgagagaagaagaagagatgag

SEQ ID NO: 6974 - DNA, 55 bp, Artificial Sequence
  Synthetic polynucleotide
gccgcgtgcaggaactgtgcgctggtgcgctggtgcgctgcagctgctgggctac

SEQ ID NO: 6975 - DNA, 55 bp, Artificial Sequence
  Synthetic polynucleotide
tgcgtttttctcatcgtacctctcgggtccgggtcgtcgaggatgggaggacata

SEQ ID NO: 6976 - DNA, 55 bp, Artificial Sequence
  Synthetic polynucleotide
agagtcaggagaatttctggatttgcgggcgggcgccttctcccctgtagaaatg

SEQ ID NO: 6977 - DNA, 55 bp, Artificial Sequence
  Synthetic polynucleotide
tgcactatgtattttatgggctaggtcggtcggctgggtattgaccataactgca

SEQ ID NO: 6978 - DNA, 55 bp, Artificial Sequence
  Synthetic polynucleotide
agagaattcataaaaggtataaaatttttaaggtataaaatttttgaaataaaca

SEQ ID NO: 6979 - DNA, 55 bp, Artificial Sequence
  Synthetic polynucleotide
catgagtatttgtgccacatggctcccacatggctccacatgcaagtttgaaaca

SEQ ID NO: 6980 - DNA, 55 bp, Artificial Sequence
  Synthetic polynucleotide
aatgctgggttttggcaggagctgctgggctggcactgctgaagtgtgtggaggc

SEQ ID NO: 6981 - DNA, 55 bp, Artificial Sequence
  Synthetic polynucleotide
ggctccagcgagcgctgggctgtgggcagtgggcagtggaaactgcagccgctgg

SEQ ID NO: 6982 - DNA, 55 bp, Artificial Sequence
  Synthetic polynucleotide
aagttcaaagaactcaggttcggttttaatcggttttaatgccaaacatgatcgg

SEQ ID NO: 6983 - DNA, 55 bp, Artificial Sequence
  Synthetic polynucleotide
ctccagccaggccatgtacagcgagcgagctggggcacttccccttcctccctat

SEQ ID NO: 6984 - DNA, 55 bp, Artificial Sequence
  Synthetic polynucleotide
gcacagcgcagctgggccttccatttagctgggtccttccatttagctgggtcag

SEQ ID NO: 6985 - DNA, 55 bp, Artificial Sequence
  Synthetic polynucleotide
aggggttgctgacacaggcgtcgctgacacaggcgtcatccaggtgacacaggag

SEQ ID NO: 6986 - DNA, 55 bp, Artificial Sequence
  Synthetic polynucleotide
tgctgaaggcctttgtggtggacatgatgatggagcggctgcgcatctcccagaa

SEQ ID NO: 6987 - DNA, 55 bp, Artificial Sequence
  Synthetic polynucleotide
gccggggcgcggccctggtctcggcggcggtggcctgtaagaaggcctgtatgct

SEQ ID NO: 6988 - DNA, 55 bp, Artificial Sequence
  Synthetic polynucleotide
ggggccaggcaagggggcggaggcctggcaagggggcggaggcctgggaggcacc

SEQ ID NO: 6989 - DNA, 55 bp, Artificial Sequence
  Synthetic polynucleotide
gcggcggctgtgccctgcctgtgaggggagcggcgcggcgcagtgggcgccggtg

SEQ ID NO: 6990 - DNA, 55 bp, Artificial Sequence
  Synthetic polynucleotide
aggagggtcagcagggtcagcctggaggcctggaggccatctgggcggcgacgtc

SEQ ID NO: 6991 - DNA, 55 bp, Artificial Sequence
  Synthetic polynucleotide
gttgtagacgcggccctggacgtgggtacgcggccctggacgtgggtgcgcgcca

SEQ ID NO: 6992 - DNA, 55 bp, Artificial Sequence
  Synthetic polynucleotide
agcgcatgttctacatcccgcagagcgcagaggtaaggaagcccgtgcgcctctc

SEQ ID NO: 6993 - DNA, 55 bp, Artificial Sequence
  Synthetic polynucleotide
ctcacgtcgtagcggtgcatgggctgcgcatgggctgcatctgcgctgcgccgtg

SEQ ID NO: 6994 - DNA, 55 bp, Artificial Sequence
  Synthetic polynucleotide
gtgtcggccttggggccgggccgggccggcgggggcagggccgagtagccggggc

SEQ ID NO: 6995 - DNA, 55 bp, Artificial Sequence
  Synthetic polynucleotide
tagagaacgatgggagcagcaggtgtcgatgggagcagcaggtgtcggcagcaga

SEQ ID NO: 6996 - DNA, 55 bp, Artificial Sequence
  Synthetic polynucleotide
cagtgcttgtgcattgcagtgacggatggatgggacaggactgctcagctgacat

SEQ ID NO: 6997 - DNA, 55 bp, Artificial Sequence
  Synthetic polynucleotide
gaggacaaggccacgctggtgctgcagggcaggttgttggtgcgtggccaaggcc

SEQ ID NO: 6998 - DNA, 55 bp, Artificial Sequence
  Synthetic polynucleotide
gccgggaagacagtcgcagtagtagctggctggcaatgagattcttacaggattt

SEQ ID NO: 6999 - DNA, 55 bp, Artificial Sequence
  Synthetic polynucleotide
cccagcaccggctgctccaggaagtcggctcggcgcggcctgttaggggatgaga

SEQ ID NO: 7000 - DNA, 55 bp, Artificial Sequence
  Synthetic polynucleotide
tggccattattgaacttacagatgggtgggtggtatgctgttaaggcccagttag

SEQ ID NO: 7001 - DNA, 55 bp, Artificial Sequence
  Synthetic polynucleotide
gccggcagcagtgacaggaggaacggaggaagggttgcttgaggacagtgctgaa

SEQ ID NO: 7002 - DNA, 55 bp, Artificial Sequence
  Synthetic polynucleotide
ttaccataatgcaacttgacaataaaagaaaggatgattaacctctaccaagata

SEQ ID NO: 7003 - DNA, 55 bp, Artificial Sequence
  Synthetic polynucleotide
cccctcgcggtgcggtccgggactgcggtccgggactgcgcccctgcgcaccgct

SEQ ID NO: 7004 - DNA, 55 bp, Artificial Sequence
  Synthetic polynucleotide
cagatgttctcaatgaacttacgcttggtatggtatgttatcgttggtacagacc

SEQ ID NO: 7005 - DNA, 55 bp, Artificial Sequence
  Synthetic polynucleotide
tcttccccctgcaggagactactggactactggattgaccccaaccaaggctgca

SEQ ID NO: 7006 - DNA, 55 bp, Artificial Sequence
  Synthetic polynucleotide
gcgcgcaggcggtcggcgggcgcagccggtcggcgggcgcagccggcggctccga

SEQ ID NO: 7007 - DNA, 55 bp, Artificial Sequence
  Synthetic polynucleotide
caacactccatttttgtttcctttataatatggccaaggagaactcccccagtgt

SEQ ID NO: 7008 - DNA, 55 bp, Artificial Sequence
  Synthetic polynucleotide
ccgctgcccacagaaagggatggcgcggcgcggccccggctggcatccaactggt

SEQ ID NO: 7009 - DNA, 55 bp, Artificial Sequence
  Synthetic polynucleotide
gcagtcaccatgttgggctttagcattagcagggtgccctccaggtaaacatgat

SEQ ID NO: 7010 - DNA, 55 bp, Artificial Sequence
  Synthetic polynucleotide
gtcttcgcttgggcttgatgagtggtcggtcggttctgcccattcatcttgtggt

SEQ ID NO: 7011 - DNA, 55 bp, Artificial Sequence
  Synthetic polynucleotide
acagggtccttctggtcctgttggtcctgttggtcctgctggtgctgttggccca

SEQ ID NO: 7012 - DNA, 55 bp, Artificial Sequence
  Synthetic polynucleotide
tagggcgcgtgcgccgccaggtgcgggtgcaggtgcgggtgcaggtgcgggtgcg

SEQ ID NO: 7013 - DNA, 55 bp, Artificial Sequence
  Synthetic polynucleotide
gaaacggggccgaaagccggggagtgagtgtggtggcagccgctgccgccgaggc

SEQ ID NO: 7014 - DNA, 55 bp, Artificial Sequence
  Synthetic polynucleotide
catttttggttggcactcttacttacttaccggagccagacaaacactttagcca

SEQ ID NO: 7015 - DNA, 55 bp, Artificial Sequence
  Synthetic polynucleotide
tacgtttcaaagtcctgctgatgctagctagggcttttgatagaggtatccgaag

SEQ ID NO: 7016 - DNA, 55 bp, Artificial Sequence
  Synthetic polynucleotide
tgcgctccagggcgaggagctgggaggagctgggatgtggtaaagggcgtgcgcg

SEQ ID NO: 7017 - DNA, 55 bp, Artificial Sequence
  Synthetic polynucleotide
tttgccatcaaattggggacatgggcttcggggcttcgaggccagcattgcagaa

SEQ ID NO: 7018 - DNA, 55 bp, Artificial Sequence
  Synthetic polynucleotide
gcacccctccacctcctccagccagccagctggatgggctgagcgtgagcctggg

SEQ ID NO: 7019 - DNA, 55 bp, Artificial Sequence
  Synthetic polynucleotide
aacctcggaacggaatactggttgtttgttaggccaaactgcttgaggtcatctg

SEQ ID NO: 7020 - DNA, 55 bp, Artificial Sequence
  Synthetic polynucleotide
tttgccctgtcaggccttcgaggaggtctaaggaggcgcctcccatcctgtaggt

SEQ ID NO: 7021 - DNA, 55 bp, Artificial Sequence
  Synthetic polynucleotide
ttggccaacaaagtggcggccgattgttgttggaggagccagccaaccatcttgt

SEQ ID NO: 7022 - DNA, 55 bp, Artificial Sequence
  Synthetic polynucleotide
tctgagcactcacccagcgagagggccgagagggccgagagggccgtggccacac

SEQ ID NO: 7023 - DNA, 55 bp, Artificial Sequence
  Synthetic polynucleotide
cagtagctggtgtgaaagatgggtccggtccggtccagtccgtcaacatcaaaac

SEQ ID NO: 7024 - DNA, 55 bp, Artificial Sequence
  Synthetic polynucleotide
ctgatatgccaatgtcaaaacggagctgaacggagctgactgcgaccacatttct

SEQ ID NO: 7025 - DNA, 55 bp, Artificial Sequence
  Synthetic polynucleotide
ccaagatatggaagagggagagggaggcgagggagagggaggcaaaggccacgga

SEQ ID NO: 7026 - DNA, 55 bp, Artificial Sequence
  Synthetic polynucleotide
ctcggcgcgcaggcggtcggcgggcgcggtcggcgggcgcagccggcggctccga

SEQ ID NO: 7027 - DNA, 55 bp, Artificial Sequence
  Synthetic polynucleotide
cctgggcatgctgggctgtttctgtggtgacggctgtttctgtggtgacggccgc

SEQ ID NO: 7028 - DNA, 55 bp, Artificial Sequence
  Synthetic polynucleotide
ccgactctccccttcttgctgacgtgctgacggactcctgcagttaccactacaa

SEQ ID NO: 7029 - DNA, 55 bp, Artificial Sequence
  Synthetic polynucleotide
gaccacataccccagccagcagcagcaggcaggagggtcagcagggtcagcctgg

SEQ ID NO: 7030 - DNA, 55 bp, Artificial Sequence
  Synthetic polynucleotide
cattgagggtggctcataccgcgtgtggtgtggtcagacacacgggacctggtgc

SEQ ID NO: 7031 - DNA, 55 bp, Artificial Sequence
  Synthetic polynucleotide
gaagtgctcgtacatttgcttgggagtcatgggagtcattaactggaacatggtc

SEQ ID NO: 7032 - DNA, 55 bp, Artificial Sequence
  Synthetic polynucleotide
aagggttcgtccagttccagaagggcaatagggcaatgtcatggttgtacttatt

SEQ ID NO: 7033 - DNA, 55 bp, Artificial Sequence
  Synthetic polynucleotide
cttcccgcagcccgggaaggggcatgggaaggggcatgggaagggcttctcgccc

SEQ ID NO: 7034 - DNA, 55 bp, Artificial Sequence
  Synthetic polynucleotide
tgttttttgtgggcatggctctctggggcatggctctctggggagcccaccggct

SEQ ID NO: 7035 - DNA, 55 bp, Artificial Sequence
  Synthetic polynucleotide
tcagctccccccaggaggtgaggttgcaggaggtgaggttgcagtaggtgaggac

SEQ ID NO: 7036 - DNA, 55 bp, Artificial Sequence
  Synthetic polynucleotide
gaggattcttcaagcagtgaggaatcagtgaggaagagaagacaggtcttgcagt

SEQ ID NO: 7037 - DNA, 55 bp, Artificial Sequence
  Synthetic polynucleotide
gggacgggggtggctctgtggctggctctgtggctggctctgcagggggccctgc

SEQ ID NO: 7038 - DNA, 55 bp, Artificial Sequence
  Synthetic polynucleotide
gctgctgctgcgccccttggggccaccctggggctgctctccttgcttttccgcc

SEQ ID NO: 7039 - DNA, 55 bp, Artificial Sequence
  Synthetic polynucleotide
cccttccggggtcgccccctgggctcacctgggctcagggttcagcagctccggg

SEQ ID NO: 7040 - DNA, 55 bp, Artificial Sequence
  Synthetic polynucleotide
cagcctctcggcgctgctgctgctgcttgcaggtaccccggatcccctgacttgc

SEQ ID NO: 7041 - DNA, 55 bp, Artificial Sequence
  Synthetic polynucleotide
cctctgtgctctcctacagggtaataatgttggtgctcctggagccaaaggtgct

SEQ ID NO: 7042 - DNA, 55 bp, Artificial Sequence
  Synthetic polynucleotide
ggagtacgtggtccgcctctggtccgcctctggtccgccggctgccgcagcaagt

SEQ ID NO: 7043 - DNA, 55 bp, Artificial Sequence
  Synthetic polynucleotide
agagtccgctgctgtagtcgtgggcagtcgtgggcagccgccggcacataggagg

SEQ ID NO: 7044 - DNA, 55 bp, Artificial Sequence
  Synthetic polynucleotide
gcacgagagatcaggagagcacgagagatcaggaggccaccggcgaggtgggaca

SEQ ID NO: 7045 - DNA, 55 bp, Artificial Sequence
  Synthetic polynucleotide
ctgcaagtcgatatccctcagtacaggagcaggagcaaaccaccttgttatcagc

SEQ ID NO: 7046 - DNA, 55 bp, Artificial Sequence
  Synthetic polynucleotide
cacctgcagccaacatggcagcagccaacatggcagcagccttcggaggcttcct

SEQ ID NO: 7047 - DNA, 55 bp, Artificial Sequence
  Synthetic polynucleotide
atcacagcgccagctggagtggatgccagctggagtggatgcactcgccacttag

SEQ ID NO: 7048 - DNA, 55 bp, Artificial Sequence
  Synthetic polynucleotide
cctcctctgttgctgcagatccgtgggcgtgggcgtgagcgcttcgagatgttcc

SEQ ID NO: 7049 - DNA, 55 bp, Artificial Sequence
  Synthetic polynucleotide
ggtcaggatgcatgggcatgcagggcatgcagggctgccgctccaccacaaaggc

SEQ ID NO: 7050 - DNA, 55 bp, Artificial Sequence
  Synthetic polynucleotide
tcaggctgagcaactgctaaagcaagaaagaggtaagtgtggaaccactagcaca

SEQ ID NO: 7051 - DNA, 55 bp, Artificial Sequence
  Synthetic polynucleotide
gccttacgcgccctacgtggagcccaacactgggccggatcccgccggtatgggc

SEQ ID NO: 7052 - DNA, 55 bp, Artificial Sequence
  Synthetic polynucleotide
tgaaagcactctcgctcattcactccctcccggtgaggctctctgcggggtcttt

SEQ ID NO: 7053 - DNA, 55 bp, Artificial Sequence
  Synthetic polynucleotide
ctaacccgggccacccacctggcggtggggtggatgaagaccacggagcccagga

SEQ ID NO: 7054 - DNA, 55 bp, Artificial Sequence
  Synthetic polynucleotide
ggcgcgcatggcctcgatgtcgtcggccgtcggccgacgaggcgcggcgcacgct

SEQ ID NO: 7055 - DNA, 55 bp, Artificial Sequence
  Synthetic polynucleotide
tgctgcatgcgcatgcccagctggtccagctggtccagctggtcccactgctggg

SEQ ID NO: 7056 - DNA, 55 bp, Artificial Sequence
  Synthetic polynucleotide
gccatggtgatgcgcataggcctgggccctgggccgggaggtgggcgtggcggct

SEQ ID NO: 7057 - DNA, 55 bp, Artificial Sequence
  Synthetic polynucleotide
gcccttgaattggccctacctgaaggctgaaggtccttggccagaccttcatcac

SEQ ID NO: 7058 - DNA, 55 bp, Artificial Sequence
  Synthetic polynucleotide
actgactggacccatgggtgggctatatataggttgccaggccagaattgcttct

SEQ ID NO: 7059 - DNA, 55 bp, Artificial Sequence
  Synthetic polynucleotide
cgtctgcttcaggcacgagcggcgcacgagcggcatacgagctccctgctgggcc

SEQ ID NO: 7060 - DNA, 55 bp, Artificial Sequence
  Synthetic polynucleotide
ggttaaagaaaagatcaagtttttggtttttggaaagtgagattgggaataacac

SEQ ID NO: 7061 - DNA, 55 bp, Artificial Sequence
  Synthetic polynucleotide
cagcagcggtagcagcagcggcagcagcagcggcagcagccgcagcccggagggc

SEQ ID NO: 7062 - DNA, 55 bp, Artificial Sequence
  Synthetic polynucleotide
tttgaagatctcttgtattctaattccctttggcataaggcatagaacatgtcct

SEQ ID NO: 7063 - DNA, 55 bp, Artificial Sequence
  Synthetic polynucleotide
gctggcggcagcgttcgcaggacgggcgacgggccctctggccctggcctcagaa

SEQ ID NO: 7064 - DNA, 55 bp, Artificial Sequence
  Synthetic polynucleotide
tactgctgataggaatatgactatatgactaggtgtgttgctggcctgtcttctc

SEQ ID NO: 7065 - DNA, 55 bp, Artificial Sequence
  Synthetic polynucleotide
cggttttggcgatctcaacagaaggtggtgtggtcatcaccaaggtactgattgg

SEQ ID NO: 7066 - DNA, 55 bp, Artificial Sequence
  Synthetic polynucleotide
tagcggaaaaaggcaccggggtggtggtggtggtggtggtggtggtggtggtggt

SEQ ID NO: 7067 - DNA, 55 bp, Artificial Sequence
  Synthetic polynucleotide
cagaaaatcttagagtgtcccatctgcatctggtaagtcagcacaagagtgtatt

SEQ ID NO: 7068 - DNA, 55 bp, Artificial Sequence
  Synthetic polynucleotide
gtggccccgactgcaaggacaaatctgacaaggacaaatctgacgaggaaaactg

SEQ ID NO: 7069 - DNA, 55 bp, Artificial Sequence
  Synthetic polynucleotide
gagtacgcggccgccactcgagcgtgcgtgcggcccatgtcctggctggcttcca

SEQ ID NO: 7070 - DNA, 55 bp, Artificial Sequence
  Synthetic polynucleotide
cacccccttcttccacaccttcgctggagatggagatgtaagtgatcaaccagcc

SEQ ID NO: 7071 - DNA, 55 bp, Artificial Sequence
  Synthetic polynucleotide
caacctgtccgacctcttccagtgggccgtgggccgtgagccgtgcactgtgctc

SEQ ID NO: 7072 - DNA, 55 bp, Artificial Sequence
  Synthetic polynucleotide
ctcgttgacatcgaaggtctcgatggatgttggagatgacgtcgctgctcagctc

SEQ ID NO: 7073 - DNA, 55 bp, Artificial Sequence
  Synthetic polynucleotide
agagagtaacaggtcctgggcagaaggacccggtcctgggcagaaggacccagta

SEQ ID NO: 7074 - DNA, 55 bp, Artificial Sequence
  Synthetic polynucleotide
gtgcggaagcaggtcgcggcagtggctggctggccgggcagctgctgcccagacc

SEQ ID NO: 7075 - DNA, 55 bp, Artificial Sequence
  Synthetic polynucleotide
acttgctttagaccatctacatagccagcctgggaataatttatagagacttaaa

SEQ ID NO: 7076 - DNA, 55 bp, Artificial Sequence
  Synthetic polynucleotide
atggtttctggagtgaaacagggatctatctggtcctgctcctaccactcataag

SEQ ID NO: 7077 - DNA, 55 bp, Artificial Sequence
  Synthetic polynucleotide
attccacgggagcggctggcggctggcggctggcgtggagtacaccttcagcctg

SEQ ID NO: 7078 - DNA, 55 bp, Artificial Sequence
  Synthetic polynucleotide
gatgctggcacctggagcacctggagcacctggagcccggaggcctggggaactc

SEQ ID NO: 7079 - DNA, 55 bp, Artificial Sequence
  Synthetic polynucleotide
gtgatccatgatgagggacactatatgatgagggacactataaaaaattattcct

SEQ ID NO: 7080 - DNA, 55 bp, Artificial Sequence
  Synthetic polynucleotide
gccttcgccgaccggccggccttcgccgaccggccggccttcgcctccttccgtg

SEQ ID NO: 7081 - DNA, 55 bp, Artificial Sequence
  Synthetic polynucleotide
ggcactgcacccgttcgcggcggacggcggcggacgacacctgccggaccagcca

SEQ ID NO: 7082 - DNA, 55 bp, Artificial Sequence
  Synthetic polynucleotide
caggcggaactgggacttgcgcacgaacatgggcagcgcacgaacatgggcacca

SEQ ID NO: 7083 - DNA, 55 bp, Artificial Sequence
  Synthetic polynucleotide
ctagggttctatgaatggacttcgacttcaaggttaagaagtcacataaatccca

SEQ ID NO: 7084 - DNA, 55 bp, Artificial Sequence
  Synthetic polynucleotide
actgtgatcaactactataccggatggatatggatgcaggtgactccaggggagg

SEQ ID NO: 7085 - DNA, 55 bp, Artificial Sequence
  Synthetic polynucleotide
gaagattaagaggacaagcagattcattcaaggtgatcagttggtccttctcggt

SEQ ID NO: 7086 - DNA, 55 bp, Artificial Sequence
  Synthetic polynucleotide
cctggcctccctcaaggaggttgtggtggtaggtctcgatttccttctccagccg

SEQ ID NO: 7087 - DNA, 55 bp, Artificial Sequence
  Synthetic polynucleotide
ttggaggacccggcgggccacactctgccttggagcctcggctgaagtggctggg

SEQ ID NO: 7088 - DNA, 55 bp, Artificial Sequence
  Synthetic polynucleotide
attcggcgcgcgtgcggcccgccgcgagtgcggcccgccgcgagtgagggttttc

SEQ ID NO: 7089 - DNA, 55 bp, Artificial Sequence
  Synthetic polynucleotide
tctacaatcttctgccgggtggaggtccgcaggagtccggcagtggccgcccgtt

SEQ ID NO: 7090 - DNA, 55 bp, Artificial Sequence
  Synthetic polynucleotide
gtgcgcgggcggcggccggaagggcgcggccggaagggcctcttcatgcggcggc

SEQ ID NO: 7091 - DNA, 55 bp, Artificial Sequence
  Synthetic polynucleotide
cgaagcccagcaccaaggaaaggagcaccaaggaaaggagcaccaggtccggctc

SEQ ID NO: 7092 - DNA, 55 bp, Artificial Sequence
  Synthetic polynucleotide
tatctgggctcggtgctgccgctcgtgcttgggtgctgccgctcgtgcttgggct

SEQ ID NO: 7093 - DNA, 55 bp, Artificial Sequence
  Synthetic polynucleotide
gggggcggcgggcgggatgagtgcggtgtgcggtgtgcggtggagcggcgcggat

SEQ ID NO: 7094 - DNA, 55 bp, Artificial Sequence
  Synthetic polynucleotide
gccctgttctacgccctggagaaggagggagggggaggacagggacggccacgcc

SEQ ID NO: 7095 - DNA, 55 bp, Artificial Sequence
  Synthetic polynucleotide
caggctccagggcgcctgccccggccggccgggcacacctcaaagaagagaaggg

SEQ ID NO: 7096 - DNA, 55 bp, Artificial Sequence
  Synthetic polynucleotide
ctgggagaactggacgggctgcagggtggtgggctgcagggtggtcaggctgctg

SEQ ID NO: 7097 - DNA, 55 bp, Artificial Sequence
  Synthetic polynucleotide
gcgggtccaccctttggcacagcggcacagcggtactgcattcctaatgatgcag

SEQ ID NO: 7098 - DNA, 55 bp, Artificial Sequence
  Synthetic polynucleotide
ctggctgcggtcctgctgtccctaggaccctggcttttatcacttacgtggagca

SEQ ID NO: 7099 - DNA, 55 bp, Artificial Sequence
  Synthetic polynucleotide
gctgagcgggggcaccgcataggggaggggagggaggacacgttgaaccatgcgt

SEQ ID NO: 7100 - DNA, 55 bp, Artificial Sequence
  Synthetic polynucleotide
ttggctgaaaacctactgtccccagaggagaggatatggttctcttccacaacct

SEQ ID NO: 7101 - DNA, 55 bp, Artificial Sequence
  Synthetic polynucleotide
agcacgcgggagcgcatgaggatgcgcatgaggatgcgcatgagggcagaggtca

SEQ ID NO: 7102 - DNA, 55 bp, Artificial Sequence
  Synthetic polynucleotide
cttcccgggcttcctcgccccacggctccacggctcctcggcctcggccgcctcg

SEQ ID NO: 7103 - DNA, 55 bp, Artificial Sequence
  Synthetic polynucleotide
tcccgagtggaaggcgctgctgctctgcgctggtgctctgcgctgctctccggct

SEQ ID NO: 7104 - DNA, 55 bp, Artificial Sequence
  Synthetic polynucleotide
ccctggtgctcctggtgctcctggtgctcctggtgcccctggccccgttggccct

SEQ ID NO: 7105 - DNA, 55 bp, Artificial Sequence
  Synthetic polynucleotide
ccgcagccatgggccgggcccggccgggcccggccgggccaacgcgggccgccca

SEQ ID NO: 7106 - DNA, 55 bp, Artificial Sequence
  Synthetic polynucleotide
agtgtctgcggggacccaggcacttctgcagggacccaggcacttctgcaggaga

SEQ ID NO: 7107 - DNA, 55 bp, Artificial Sequence
  Synthetic polynucleotide
gtgattgcagtactgtcggatttctgctgtcggatttctgtataattgggctgtg

SEQ ID NO: 7108 - DNA, 55 bp, Artificial Sequence
  Synthetic polynucleotide
caggtcacagcggagtgaatcagctcagctcggtggtgtctttgtcaacgggcgg

SEQ ID NO: 7109 - DNA, 55 bp, Artificial Sequence
  Synthetic polynucleotide
gaaggggaagaaggcggaatggtggtggagtggagatggacgtagagtggcgccc

SEQ ID NO: 7110 - DNA, 55 bp, Artificial Sequence
  Synthetic polynucleotide
tgccgctggcgtggctggcgcaggcgggcgtggctggcgcaggcgggcctggcgc

SEQ ID NO: 7111 - DNA, 55 bp, Artificial Sequence
  Synthetic polynucleotide
tcctggcgcggggctggcgcggggctggcgcggggctttttgcaccccgccgcga

SEQ ID NO: 7112 - DNA, 55 bp, Artificial Sequence
  Synthetic polynucleotide
agcatgtccttggggccctgggggaagcctgggggaagccagggggaagccagga

SEQ ID NO: 7113 - DNA, 55 bp, Artificial Sequence
  Synthetic polynucleotide
actattttgtgggctttctttccgaggccgaggccacggccacgttggcgggggc

SEQ ID NO: 7114 - DNA, 55 bp, Artificial Sequence
  Synthetic polynucleotide
attcagatcacatgaccttcctgcagccagcgggtgaagaacatgctcattgcct

SEQ ID NO: 7115 - DNA, 55 bp, Artificial Sequence
  Synthetic polynucleotide
tcattgttcgctgaaggggaaggctcgaaggggaaggctcgcaagcgatgtagat

SEQ ID NO: 7116 - DNA, 55 bp, Artificial Sequence
  Synthetic polynucleotide
agtttgtaggacgttgccaaagtagtcagtcggcttctgaaaacttgatctgaat

SEQ ID NO: 7117 - DNA, 55 bp, Artificial Sequence
  Synthetic polynucleotide
gatgcactcacagggcagcgatgcactcacagggcagcgattacctggacatcgg

SEQ ID NO: 7118 - DNA, 55 bp, Artificial Sequence
  Synthetic polynucleotide
tgaaaggaatccgtttcataggaaatgggtgggtattgtaaatttcccagctcca

SEQ ID NO: 7119 - DNA, 55 bp, Artificial Sequence
  Synthetic polynucleotide
tcccccatgcctcccgagttctgggagggaagggtcgatgctggagaagccggcc

SEQ ID NO: 7120 - DNA, 55 bp, Artificial Sequence
  Synthetic polynucleotide
gctgacatccttggccatgctgatgttggttggatagcttctataggagcattga

SEQ ID NO: 7121 - DNA, 55 bp, Artificial Sequence
  Synthetic polynucleotide
gcctcttaacaatggtcttgtgaagggtgaaggctttcagcagcctaaacacaaa

SEQ ID NO: 7122 - DNA, 55 bp, Artificial Sequence
  Synthetic polynucleotide
cgctggaactgctccgcgcttgagggcggagggcggcggccgcctgccgcaccac

SEQ ID NO: 7123 - DNA, 55 bp, Artificial Sequence
  Synthetic polynucleotide
gctgggagaagtgggagctggacctggacctggacatcaaggaggtcttcgtcca

SEQ ID NO: 7124 - DNA, 55 bp, Artificial Sequence
  Synthetic polynucleotide
tccaccttcgtgggcaaggtgtggcgggcaaggtgtggctcacggtgctggtggt

SEQ ID NO: 7125 - DNA, 55 bp, Artificial Sequence
  Synthetic polynucleotide
accctcaaggtgttccaggacagcaaggcaaggcctgggagaacttccgcaccct

SEQ ID NO: 7126 - DNA, 55 bp, Artificial Sequence
  Synthetic polynucleotide
tacagtcctcagcaaggtgcaggtgggtgcaggtgggtggagtactaggaaaaag

SEQ ID NO: 7127 - DNA, 55 bp, Artificial Sequence
  Synthetic polynucleotide
gctggctcctccggggtccaggcagcaggcaggccacagggcagaactgaccatc

SEQ ID NO: 7128 - DNA, 55 bp, Artificial Sequence
  Synthetic polynucleotide
cctgagtctgctctttccccgtgccaggcagggcccgggcggccagcgagcaggc

SEQ ID NO: 7129 - DNA, 55 bp, Artificial Sequence
  Synthetic polynucleotide
gagtttcccgctgtctccagcggtgcggtgcgggtgaagctggtgtctgcggggt

SEQ ID NO: 7130 - DNA, 55 bp, Artificial Sequence
  Synthetic polynucleotide
tgcggcggaggcgggggtgcggccgaggcgggggtgcggccggcgggcctcccag

SEQ ID NO: 7131 - DNA, 55 bp, Artificial Sequence
  Synthetic polynucleotide
cacggctggccgtaggcggcgggcggcgcgcggcgcggcggcgtagggcagcgcc

SEQ ID NO: 7132 - DNA, 55 bp, Artificial Sequence
  Synthetic polynucleotide
ggaggcagaccaggaacagcaggagggagccggtgggtagcccagagccggagtc

SEQ ID NO: 7133 - DNA, 55 bp, Artificial Sequence
  Synthetic polynucleotide
catgcgctgtgaccgcaagatggaggtgggaggtggcgttcatggtgtgtgccat

SEQ ID NO: 7134 - DNA, 55 bp, Artificial Sequence
  Synthetic polynucleotide
ctggaaggcctcgttcctccgagctggagctggcgtctaccccgagaaggaccag

SEQ ID NO: 7135 - DNA, 55 bp, Artificial Sequence
  Synthetic polynucleotide
ccctcggcctgtgacgcctcgctggagggctggagaagcagggcgagatccctga

SEQ ID NO: 7136 - DNA, 55 bp, Artificial Sequence
  Synthetic polynucleotide
tgtgggggctggcggagctgctggagctgctggagctcgacctgacctccaacca

SEQ ID NO: 7137 - DNA, 55 bp, Artificial Sequence
  Synthetic polynucleotide
cggctgcagcagctgcggctgcagcagctgcggctgcagccgcgggccccggtag

SEQ ID NO: 7138 - DNA, 55 bp, Artificial Sequence
  Synthetic polynucleotide
caggactcccctcttgcctgcagggcaggccggtattaccgcaccaaccacactg

SEQ ID NO: 7139 - DNA, 55 bp, Artificial Sequence
  Synthetic polynucleotide
gccagctgaaaaggggctctgtggacagacaggatgagaggcctggaccccagca

SEQ ID NO: 7140 - DNA, 55 bp, Artificial Sequence
  Synthetic polynucleotide
aagaccatcagtgcgaggtcggcatgaggtcggcatgatcgtgggtaagggctcc

SEQ ID NO: 7141 - DNA, 55 bp, Artificial Sequence
  Synthetic polynucleotide
ttcagcagcttctgctttgctttgctttgccggagaggctgaaggcgccatcctg

SEQ ID NO: 7142 - DNA, 55 bp, Artificial Sequence
  Synthetic polynucleotide
tacggggagctgtggctgcagctgtctgctgggctcctcgggaggcctgaaattt

SEQ ID NO: 7143 - DNA, 55 bp, Artificial Sequence
  Synthetic polynucleotide
gactggccggtgcactcaaagggcactcaaagggcgctcactgtgggccaggatg

SEQ ID NO: 7144 - DNA, 55 bp, Artificial Sequence
  Synthetic polynucleotide
gttctgcagatgtggtcggttctgcagatgtggtcggtcctgcaggacggtccca

SEQ ID NO: 7145 - DNA, 55 bp, Artificial Sequence
  Synthetic polynucleotide
tcctcagtttgtggtctgccagctaaataaaggtgaagatatattcctccaattc

SEQ ID NO: 7146 - DNA, 55 bp, Artificial Sequence
  Synthetic polynucleotide
ggctactatcccaacgaccatacccgtccgtggtgctgctggactcccggatcac

SEQ ID NO: 7147 - DNA, 55 bp, Artificial Sequence
  Synthetic polynucleotide
aggcagttattttggagggaaagtagagagaggctcagcccaaaggtatccactt

SEQ ID NO: 7148 - DNA, 55 bp, Artificial Sequence
  Synthetic polynucleotide
taccaaaacattctagcggccatcgagggagggctccaggttctacacctcggac

SEQ ID NO: 7149 - DNA, 55 bp, Artificial Sequence
  Synthetic polynucleotide
gcaggtggtagactctcgttctctcaggacaggacagatgctctcctcggggagt

SEQ ID NO: 7150 - DNA, 55 bp, Artificial Sequence
  Synthetic polynucleotide
tccctaaaagcttcggctacagctacagctcggtggtgtgtgtctgcaatgccac

SEQ ID NO: 7151 - DNA, 55 bp, Artificial Sequence
  Synthetic polynucleotide
gacctcggtggccagggccctgcgcgtgtagggctctgcgcgtgtagggctctgc

SEQ ID NO: 7152 - DNA, 55 bp, Artificial Sequence
  Synthetic polynucleotide
tagccagctctgcttggagcagggggtgcttggagcagggggaagtcgtagcggt

SEQ ID NO: 7153 - DNA, 55 bp, Artificial Sequence
  Synthetic polynucleotide
attccaattacctggacttccagctggtggtggtgagtccttcctgctgtcagtg

SEQ ID NO: 7154 - DNA, 55 bp, Artificial Sequence
  Synthetic polynucleotide
gcgccgaggaggagatggaggccgggaggccgggcggccgcggcccgtgctgcgc

SEQ ID NO: 7155 - DNA, 55 bp, Artificial Sequence
  Synthetic polynucleotide
ccacgatacctgcgtggcacgatacctgcgtggctggggctgcgggctccggggt

SEQ ID NO: 7156 - DNA, 55 bp, Artificial Sequence
  Synthetic polynucleotide
tcctggacctcctggtccccctggtccccctggtcctcccagcgctggtttcgac

SEQ ID NO: 7157 - DNA, 55 bp, Artificial Sequence
  Synthetic polynucleotide
caggagacagctgaacagccaggtagcgagcggcacctgaagaaagcaggcaatt

SEQ ID NO: 7158 - DNA, 55 bp, Artificial Sequence
  Synthetic polynucleotide
cttcttccgccggttggtctgttgtgactcaggtctgttgtgactcaagtctgta

SEQ ID NO: 7159 - DNA, 55 bp, Artificial Sequence
  Synthetic polynucleotide
cacacacagtagggggtgcagggccggccgaggagtccagccctggcagcggggc

SEQ ID NO: 7160 - DNA, 55 bp, Artificial Sequence
  Synthetic polynucleotide
aggcttcagcaccagcgattacgacgacgttggctgggagagtcctcacaatggc

SEQ ID NO: 7161 - DNA, 55 bp, Artificial Sequence
  Synthetic polynucleotide
ccgtgccacaggtggcggtgttgtacgtggcggtgttgtacttggcgtgcaggct

SEQ ID NO: 7162 - DNA, 55 bp, Artificial Sequence
  Synthetic polynucleotide
acctacagcctgggcggcggcggcgcggcgcggcgcgcgtgcgggtgcgcggctc

SEQ ID NO: 7163 - DNA, 55 bp, Artificial Sequence
  Synthetic polynucleotide
gctgacaatctatctgaaaaattggaaaattggaaaggtatgttcatgtacattg

SEQ ID NO: 7164 - DNA, 55 bp, Artificial Sequence
  Synthetic polynucleotide
ctgggagaactggacgggctgcagggctgcagggctgccaggctgccggccacac

SEQ ID NO: 7165 - DNA, 55 bp, Artificial Sequence
  Synthetic polynucleotide
aggtgttgaggtcggcgcagacactgggttgggtccaaatctatttcagagaaag

SEQ ID NO: 7166 - DNA, 55 bp, Artificial Sequence
  Synthetic polynucleotide
ccatcctctcttttagcctccacaggcgagcggctcctctccacttggcttttcc

SEQ ID NO: 7167 - DNA, 55 bp, Artificial Sequence
  Synthetic polynucleotide
gacactgaaactttacgtaaatcgtaaatgtgggtgctgttgtgatgaggaaatc

SEQ ID NO: 7168 - DNA, 55 bp, Artificial Sequence
  Synthetic polynucleotide
acctgtccccagcggcggcggcagcggcggcggcggcggctgcggcggcggcggc

SEQ ID NO: 7169 - DNA, 55 bp, Artificial Sequence
  Synthetic polynucleotide
gttgcccaggaagccgcagacgtcggccgtcggccccgaccagaggcacccccag

SEQ ID NO: 7170 - DNA, 55 bp, Artificial Sequence
  Synthetic polynucleotide
cctcagtcaagttggaaacagtctagtctttggtgtaatcctgaaataaaaaagc

SEQ ID NO: 7171 - DNA, 55 bp, Artificial Sequence
  Synthetic polynucleotide
ttttgttgagacactggatatttgagccactggatatttgagcctggatatgagt

SEQ ID NO: 7172 - DNA, 55 bp, Artificial Sequence
  Synthetic polynucleotide
gttgaaggcgccggcggtggggcggtggggcggtggcgcaggtcaatgaggatgt

SEQ ID NO: 7173 - DNA, 55 bp, Artificial Sequence
  Synthetic polynucleotide
tttactcacacatccgttggacacctccgttggacacctgcataggggaagtgga

SEQ ID NO: 7174 - DNA, 55 bp, Artificial Sequence
  Synthetic polynucleotide
taccagctgaccttgtgggggccagccagaaggcaacatcctggactatgccaac

SEQ ID NO: 7175 - DNA, 55 bp, Artificial Sequence
  Synthetic polynucleotide
ggggggccttccggatgtagatcttccaccaggtggaggagtcggggttctcggc

SEQ ID NO: 7176 - DNA, 55 bp, Artificial Sequence
  Synthetic polynucleotide
caatcgggacagctttgataccactcggctcggcagaggctggtgctggagattg

SEQ ID NO: 7177 - DNA, 55 bp, Artificial Sequence
  Synthetic polynucleotide
ccatggggaactgggctgtgaatgagggaggggctctccatttttgtcattgtaa

SEQ ID NO: 7178 - DNA, 55 bp, Artificial Sequence
  Synthetic polynucleotide
cgcagggtgtagcggagggcgcggggcgcggggccgggcgccgccagcggcgtgc

SEQ ID NO: 7179 - DNA, 55 bp, Artificial Sequence
  Synthetic polynucleotide
ctgaatcccttgcaggtatgtcctatgtcctggatgatgaatacacaagctcagt

SEQ ID NO: 7180 - DNA, 55 bp, Artificial Sequence
  Synthetic polynucleotide
atatttccatcttctgtgaaatgtttgtttaggaggcagaatgtgtgagcgcaag

SEQ ID NO: 7181 - DNA, 55 bp, Artificial Sequence
  Synthetic polynucleotide
gcagcggcagtggcgggggcggcggcggggcggcggcagctctggcgggggcagc

SEQ ID NO: 7182 - DNA, 55 bp, Artificial Sequence
  Synthetic polynucleotide
agggagcaggaggaggtgggggctggggcgtgggggctggggcttggggccacag

SEQ ID NO: 7183 - DNA, 55 bp, Artificial Sequence
  Synthetic polynucleotide
aatccggtacaacagtgatctacagtgatctggttcagaaatatcacccttgctt

SEQ ID NO: 7184 - DNA, 55 bp, Artificial Sequence
  Synthetic polynucleotide
tagtgttggcctgagaaggttgccccgagaaggttgccccatgtccaggctcatg

SEQ ID NO: 7185 - DNA, 55 bp, Artificial Sequence
  Synthetic polynucleotide
caggctctggcagaaggcagctggcggggaaggcagctggcggggaaaacaccgg

SEQ ID NO: 7186 - DNA, 55 bp, Artificial Sequence
  Synthetic polynucleotide
cagagactgaaggatgacgctcctgaggccaggccgtgacagaggagcaggcaga

SEQ ID NO: 7187 - DNA, 55 bp, Artificial Sequence
  Synthetic polynucleotide
tattcttaattccacatctttctgtataaatggctcatctgtataaatggctcat

SEQ ID NO: 7188 - DNA, 55 bp, Artificial Sequence
  Synthetic polynucleotide
ggcctatgagctgctgccggcactggacactggacgaggtgctggctagtgacag

SEQ ID NO: 7189 - DNA, 55 bp, Artificial Sequence
  Synthetic polynucleotide
aaatgagccttctgctgggctgttgatgagtggataccccttccagtgcctgggc

SEQ ID NO: 7190 - DNA, 55 bp, Artificial Sequence
  Synthetic polynucleotide
cctgtgccgcgccggaacagcacggaatcccggaatcctcctgctccgggacgcc

SEQ ID NO: 7191 - DNA, 55 bp, Artificial Sequence
  Synthetic polynucleotide
aatgatatactaaaggaatttatgaatttatggttcgaaatacatacatttttcc

SEQ ID NO: 7192 - DNA, 55 bp, Artificial Sequence
  Synthetic polynucleotide
ggtgttcaccacatcaagcgccgggacatcgggacatcgtgctcaagtgggagct

SEQ ID NO: 7193 - DNA, 55 bp, Artificial Sequence
  Synthetic polynucleotide
cctcgggctgcactaccccccgcggaagagcggaagatgaggctggagacgcagc

SEQ ID NO: 7194 - DNA, 55 bp, Artificial Sequence
  Synthetic polynucleotide
gttgcactggaagctggcgggaccacacacaggtgagcaccgggcaggaggcctc

SEQ ID NO: 7195 - DNA, 55 bp, Artificial Sequence
  Synthetic polynucleotide
ggcctggactcgggggagctgcagtccgtccggcccggagtcgaggtgactgcac

SEQ ID NO: 7196 - DNA, 55 bp, Artificial Sequence
  Synthetic polynucleotide
actgtctgggtgtgctcactctgccaggccagggcctgcggtccaatgtcctctt

SEQ ID NO: 7197 - DNA, 55 bp, Artificial Sequence
  Synthetic polynucleotide
ccaagcaccacaaggaaaagccaggccccaaggaaaagccaggccccgaggacaa

SEQ ID NO: 7198 - DNA, 55 bp, Artificial Sequence
  Synthetic polynucleotide
gaggacagggcttatggcagaattggccattggccatcatgatgcaggccttcca

SEQ ID NO: 7199 - DNA, 55 bp, Artificial Sequence
  Synthetic polynucleotide
agcacctaccttcagctcctgcatggtgcatggagggctcatggcccagctccct

SEQ ID NO: 7200 - DNA, 55 bp, Artificial Sequence
  Synthetic polynucleotide
tgcagctcgggagaggagctggacttgctgaggagctggacttgctcaggggctg

SEQ ID NO: 7201 - DNA, 55 bp, Artificial Sequence
  Synthetic polynucleotide
aggctagctgtgtccgcggcatgcggcatgcggcctggcgcacctgcacgtggag

SEQ ID NO: 7202 - DNA, 55 bp, Artificial Sequence
  Synthetic polynucleotide
ccatggagtaatgctcaatctgatagaagatggtggtcagcccctgggtcgtgaa

SEQ ID NO: 7203 - DNA, 55 bp, Artificial Sequence
  Synthetic polynucleotide
gcccggcccctcaggctccccaaccaggcacggcagtggccactgtgtccatctg

SEQ ID NO: 7204 - DNA, 55 bp, Artificial Sequence
  Synthetic polynucleotide
cagcaaacttcggggggcggcggcggccggcggcaaccagaaaaacagcccggac

SEQ ID NO: 7205 - DNA, 55 bp, Artificial Sequence
  Synthetic polynucleotide
acggccagcgtgtaggggttcagcagggcaggggtgcgtagagcaccagtggccg

SEQ ID NO: 7206 - DNA, 55 bp, Artificial Sequence
  Synthetic polynucleotide
caagcagaaaatgaagaaaagaaaagaaaaaggctgaagcacgagctagaaacaa

SEQ ID NO: 7207 - DNA, 55 bp, Artificial Sequence
  Synthetic polynucleotide
ctgccaccacactccccggctttcggctttcggccccgtttcttgggaatggcct

SEQ ID NO: 7208 - DNA, 55 bp, Artificial Sequence
  Synthetic polynucleotide
tctgcgagagggtggcgggctgggccagccaggtgcagcagtgcgatgtcattgt

SEQ ID NO: 7209 - DNA, 55 bp, Artificial Sequence
  Synthetic polynucleotide
actgagaaacgtcttccagctggggaatgttggaatgttatcttcatggaagcca

SEQ ID NO: 7210 - DNA, 55 bp, Artificial Sequence
  Synthetic polynucleotide
aaatagcagaaataaaagaaaagaaaagattggaactaggtcagctgaagatcct

SEQ ID NO: 7211 - DNA, 55 bp, Artificial Sequence
  Synthetic polynucleotide
aggctgtatctccattgtctcctcgaggtcaggtcgaatatccaaatagcaattt

SEQ ID NO: 7212 - DNA, 55 bp, Artificial Sequence
  Synthetic polynucleotide
gcatcattgccgtggtctcggtcattggcgtggtctcggtcactgtgctgctggc

SEQ ID NO: 7213 - DNA, 55 bp, Artificial Sequence
  Synthetic polynucleotide
gggaaccagcaggaccgggagcaccaggaccgggagcaccagcagggccagcagg

SEQ ID NO: 7214 - DNA, 55 bp, Artificial Sequence
  Synthetic polynucleotide
taggtcttgtcggctgcagcagcagccagctggtgtatctgtagcctttggagca

SEQ ID NO: 7215 - DNA, 55 bp, Artificial Sequence
  Synthetic polynucleotide
ccatggtcgcctccttccacggcacctgcctggttcctggtgggcctggtgagct

SEQ ID NO: 7216 - DNA, 55 bp, Artificial Sequence
  Synthetic polynucleotide
ctgcactggtgtgggcgagtgtcggtcttccggtcttccagtctccagccggtga

SEQ ID NO: 7217 - DNA, 55 bp, Artificial Sequence
  Synthetic polynucleotide
gctgggggccctggacaaggctgggctccctggacaaggctgggctcccggcccc

SEQ ID NO: 7218 - DNA, 55 bp, Artificial Sequence
  Synthetic polynucleotide
ggacggtaacggcggaggcggaggcggaggcggcggaggtaagaaggattccatt

SEQ ID NO: 7219 - DNA, 55 bp, Artificial Sequence
  Synthetic polynucleotide
tggcctttggggtccgggcgtgcgggcgtgcgggcggcgggctcgggcgcgggcg

SEQ ID NO: 7220 - DNA, 55 bp, Artificial Sequence
  Synthetic polynucleotide
tctcaatcaggttgggagcaacaagtgatggggagcaacaagtgatggggcacat

SEQ ID NO: 7221 - DNA, 55 bp, Artificial Sequence
  Synthetic polynucleotide
cccccgcctcctgggcccgggcccgggcccggggctgcaagcgtccttcgggcct

SEQ ID NO: 7222 - DNA, 55 bp, Artificial Sequence
  Synthetic polynucleotide
ccgcccgccggagctgccccggagccgccccggagccgccgctcggaacatggtc

SEQ ID NO: 7223 - DNA, 55 bp, Artificial Sequence
  Synthetic polynucleotide
gagtcgatcctgcgcgcgcgcgccgcgccgtggtcgccttccacacgggcaactt

SEQ ID NO: 7224 - DNA, 55 bp, Artificial Sequence
  Synthetic polynucleotide
ccgggtcggcggccccggggcgacgcgacgtggagagcaggctggatgccctcca

SEQ ID NO: 7225 - DNA, 55 bp, Artificial Sequence
  Synthetic polynucleotide
gaggccacaggcattgcacaggtattgcacaggtagtggccggtgccgtcccgcc

SEQ ID NO: 7226 - DNA, 55 bp, Artificial Sequence
  Synthetic polynucleotide
cggcggctgcagcggcagccgcggcagcagcggcagccgcggcagcagcggcggc

SEQ ID NO: 7227 - DNA, 55 bp, Artificial Sequence
  Synthetic polynucleotide
aggaaatggcgcctgaaaaatggtacagtctggtacagtctgggcaaggttccag

SEQ ID NO: 7228 - DNA, 55 bp, Artificial Sequence
  Synthetic polynucleotide
acatatgtatggcttccaccagggaagacagggaagactttatcatcttctttct

SEQ ID NO: 7229 - DNA, 55 bp, Artificial Sequence
  Synthetic polynucleotide
cacttcgcaaagacgcaggaagaaagacgcaggaagaaatccgcggagagccttt

SEQ ID NO: 7230 - DNA, 55 bp, Artificial Sequence
  Synthetic polynucleotide
agtaagtgtatcttacccacacactttggttggtttctctttactccaaaaacca

SEQ ID NO: 7231 - DNA, 55 bp, Artificial Sequence
  Synthetic polynucleotide
gctgactggacttcccggtgctgtggtctgtggtctgaggggagaacgaggcagt

SEQ ID NO: 7232 - DNA, 55 bp, Artificial Sequence
  Synthetic polynucleotide
ccctctctttttaatgacaaggaaattaattggctttcatgcttccctggcccag

SEQ ID NO: 7233 - DNA, 55 bp, Artificial Sequence
  Synthetic polynucleotide
ataaatgacagaaggcagggacttgacttgaggagcctcttctaccaggcatcac

SEQ ID NO: 7234 - DNA, 55 bp, Artificial Sequence
  Synthetic polynucleotide
agcgcgtccacatgggcgcgcgcgcccacatgggcgcgcgcgcggtcgcgcatct

SEQ ID NO: 7235 - DNA, 55 bp, Artificial Sequence
  Synthetic polynucleotide
cgcccttacccaggcagccgagaaggtcgcaggcagccgagaaggtcgcaggcag

SEQ ID NO: 7236 - DNA, 55 bp, Artificial Sequence
  Synthetic polynucleotide
actttgatcaccatcaccaacaacattgattggctcaatagcaagaatgtgtgcc

SEQ ID NO: 7237 - DNA, 55 bp, Artificial Sequence
  Synthetic polynucleotide
tcaaagcggactttgtggcggaactgggggcggaactgggggcggcacaggggct

SEQ ID NO: 7238 - DNA, 55 bp, Artificial Sequence
  Synthetic polynucleotide
ctagcatgaagacggtgaagacggttaagacggttttctcggtggggcgggacac

SEQ ID NO: 7239 - DNA, 55 bp, Artificial Sequence
  Synthetic polynucleotide
agtataaagagtatcttggactggacatcttggacatcttttaaccaggagagaa

SEQ ID NO: 7240 - DNA, 55 bp, Artificial Sequence
  Synthetic polynucleotide
gctgctgctgctgttgctgctgctgctgctgggcaggctgcaactgtgctgaaag

SEQ ID NO: 7241 - DNA, 55 bp, Artificial Sequence
  Synthetic polynucleotide
gtcttcatagaccattttgtgtttgtttgaaggtatatccagagaagaagacaga

SEQ ID NO: 7242 - DNA, 55 bp, Artificial Sequence
  Synthetic polynucleotide
gccattctccttgaagtactgggggatggatggtggagaagtttccagcgtgcac

SEQ ID NO: 7243 - DNA, 55 bp, Artificial Sequence
  Synthetic polynucleotide
agctggcgggaccacaggtgagcaccgaccgggcaggaggcctcgtctgagccgt

SEQ ID NO: 7244 - DNA, 55 bp, Artificial Sequence
  Synthetic polynucleotide
gaagtattgctcccccagtggattgggtggtggctccattcactccaatgctgag

SEQ ID NO: 7245 - DNA, 55 bp, Artificial Sequence
  Synthetic polynucleotide
cttcctcctggtggttgggatggggctggatggggctggctggggccttcctggc

SEQ ID NO: 7246 - DNA, 55 bp, Artificial Sequence
  Synthetic polynucleotide
cctcttaaaacgctcatagagtaaactaactggttgtgcagtaaaagcaactggt

SEQ ID NO: 7247 - DNA, 55 bp, Artificial Sequence
  Synthetic polynucleotide
gggtcctgtgccgggagacggggctggagacggggctgctggccctgcactcggc

SEQ ID NO: 7248 - DNA, 55 bp, Artificial Sequence
  Synthetic polynucleotide
cagaaaacctaccagggcagctacggtttccggtttccgtctgggcttcttgcat

SEQ ID NO: 7249 - DNA, 55 bp, Artificial Sequence
  Synthetic polynucleotide
caagaaaagtttgcaccataagacttgacttggacttgggttttggaaccttcct

SEQ ID NO: 7250 - DNA, 55 bp, Artificial Sequence
  Synthetic polynucleotide
ttggcctgactacaccgaggacgtggggtggggtttgacatcggccaggcgatgc

SEQ ID NO: 7251 - DNA, 55 bp, Artificial Sequence
  Synthetic polynucleotide
ggggaactgtattttgtggattctattttgtggattctgacccattgcaggatca

SEQ ID NO: 7252 - DNA, 55 bp, Artificial Sequence
  Synthetic polynucleotide
cttctgtttttctccaggtctggtgtggcgtggccctcgaccttgcctgctccac

SEQ ID NO: 7253 - DNA, 55 bp, Artificial Sequence
  Synthetic polynucleotide
ggaaatgtgattgttgcagatacatctatctggtccagctatcctttgcttagga

SEQ ID NO: 7254 - DNA, 55 bp, Artificial Sequence
  Synthetic polynucleotide
ctcccctccctccctgcccccaggagtgagtggttcaccgtcttggagcattacc

SEQ ID NO: 7255 - DNA, 55 bp, Artificial Sequence
  Synthetic polynucleotide
ccctttcttcatcagtggggcgctggagtggggcgctggagtccaagggattgtg

SEQ ID NO: 7256 - DNA, 55 bp, Artificial Sequence
  Synthetic polynucleotide
ccaccagacggaggagctcaacctgtgggtgggtgcgtggctgcagggctgccct

SEQ ID NO: 7257 - DNA, 55 bp, Artificial Sequence
  Synthetic polynucleotide
cagctcctcgccctggagcgcaagttcccctggagcgcaagttccgtcagaaaca

SEQ ID NO: 7258 - DNA, 55 bp, Artificial Sequence
  Synthetic polynucleotide
gcttggctccctgcagtttggctacaacactggctacaacactggagtcatcaat

SEQ ID NO: 7259 - DNA, 55 bp, Artificial Sequence
  Synthetic polynucleotide
attcagatgagcagttgaactctggaactctggaaggcaaagtccttcacagaat

SEQ ID NO: 7260 - DNA, 55 bp, Artificial Sequence
  Synthetic polynucleotide
tcggccgcaggaggcttcagcaccagcaggaggcttcagcaccagcgattacgac

SEQ ID NO: 7261 - DNA, 55 bp, Artificial Sequence
  Synthetic polynucleotide
gccggtggtgcaggatgccgactggccagctggccagctgcaacccagatgccct

SEQ ID NO: 7262 - DNA, 55 bp, Artificial Sequence
  Synthetic polynucleotide
tcctttgtagagagtgttcatctgggaatctgggacttggatgagacaatcattg

SEQ ID NO: 7263 - DNA, 55 bp, Artificial Sequence
  Synthetic polynucleotide
ccattctcctccgtgtacgcaaagtcaaacgggtacacaaagtcaaacgggtaca

SEQ ID NO: 7264 - DNA, 55 bp, Artificial Sequence
  Synthetic polynucleotide
tgaggaggaggaggaggaggaggaggagggcggtggagggggcgagcgcaaggtg

SEQ ID NO: 7265 - DNA, 55 bp, Artificial Sequence
  Synthetic polynucleotide
cctggctgccggtgcagctgtcggtggggtgggggtgtggcagccatagaccggg

SEQ ID NO: 7266 - DNA, 55 bp, Artificial Sequence
  Synthetic polynucleotide
ccttcctgggcatggccgtgagcacccgcatggccgtgagcaccctgtgtggcga

SEQ ID NO: 7267 - DNA, 55 bp, Artificial Sequence
  Synthetic polynucleotide
gcctgcaggctgagcgagcgcaggcagcgcaggcggcgcaggccctgcagcgagc

SEQ ID NO: 7268 - DNA, 55 bp, Artificial Sequence
  Synthetic polynucleotide
ctgagtaatacctctgagcctggaatctcttggaatctcttttgacgagtcatca

SEQ ID NO: 7269 - DNA, 55 bp, Artificial Sequence
  Synthetic polynucleotide
ggtggccccgactgcaaggacaaatctgaaaggacaaatctgacgaggaaaactg

SEQ ID NO: 7270 - DNA, 55 bp, Artificial Sequence
  Synthetic polynucleotide
tgaggctgttcaaggggatggtactctctctggccaatgaagtcattcttggagg

SEQ ID NO: 7271 - DNA, 55 bp, Artificial Sequence
  Synthetic polynucleotide
gtggggctgaggctgcagctggccagcagctggccagcagcagggcaacagccag

SEQ ID NO: 7272 - DNA, 55 bp, Artificial Sequence
  Synthetic polynucleotide
gcgctgccgcgcagatcgcgcagatcgcgcaggcactgctgggcgccgaggagcg

SEQ ID NO: 7273 - DNA, 55 bp, Artificial Sequence
  Synthetic polynucleotide
gattggttattccttcatgatggttcatgatggtattttacactcttccttgcat

SEQ ID NO: 7274 - DNA, 55 bp, Artificial Sequence
  Synthetic polynucleotide
gtttccagtagcagctgacagagggttagagggttattcaacagcccgcccaagc

SEQ ID NO: 7275 - DNA, 55 bp, Artificial Sequence
  Synthetic polynucleotide
tttcacgttgagctgtgcagagaaggcagaaggcaagaaccttctgaagcatttt

SEQ ID NO: 7276 - DNA, 55 bp, Artificial Sequence
  Synthetic polynucleotide
cgccgcccccgaggtccgctgctgcccccgaggtccgctgctgtgtggatgccgt

SEQ ID NO: 7277 - DNA, 55 bp, Artificial Sequence
  Synthetic polynucleotide
ccccttccaccaccatggcaaacaggttcttggcaaacaggttcttcccaatcag

SEQ ID NO: 7278 - DNA, 55 bp, Artificial Sequence
  Synthetic polynucleotide
gagccatttgactacgtggactgtggactgtggcctgggcaggctgtgggcattt

SEQ ID NO: 7279 - DNA, 55 bp, Artificial Sequence
  Synthetic polynucleotide
aggaacgcgttggcgcgccggcgccggcgccggtgcaggacgccgtgggcttcct

SEQ ID NO: 7280 - DNA, 55 bp, Artificial Sequence
  Synthetic polynucleotide
tcatcctgcagctgctgcagctgctgcagctggagccggatgaggaccaggtgcg

SEQ ID NO: 7281 - DNA, 55 bp, Artificial Sequence
  Synthetic polynucleotide
gacagaggtgttggcagtggtggcatgtggtggcatgaggaatagtgacaggcac

SEQ ID NO: 7282 - DNA, 55 bp, Artificial Sequence
  Synthetic polynucleotide
cgatgtggtggggctgaggtcagtagtagtaggtttccttctccacccaacctgg

SEQ ID NO: 7283 - DNA, 55 bp, Artificial Sequence
  Synthetic polynucleotide
gtctgcctccacagggggactccgggactccggcagccccttggtctgcaacggg

SEQ ID NO: 7284 - DNA, 55 bp, Artificial Sequence
  Synthetic polynucleotide
ctcacaccccacagggtggagggtggaacgtggaacgtgcggctgcgtggacctc

SEQ ID NO: 7285 - DNA, 55 bp, Artificial Sequence
  Synthetic polynucleotide
aggtgtgtgactcttcttggatgatgactcaggatgatgactcatcacgttctac

SEQ ID NO: 7286 - DNA, 55 bp, Artificial Sequence
  Synthetic polynucleotide
gaaggcaatctccacgtaaatgaagcgacggggaagcgacgggtgggatctgcca

SEQ ID NO: 7287 - DNA, 55 bp, Artificial Sequence
  Synthetic polynucleotide
gcggcggcggcggcgcgggcggcggcggcgcgggcggcggcggcggcagcagcag

SEQ ID NO: 7288 - DNA, 55 bp, Artificial Sequence
  Synthetic polynucleotide
cgtggggatggggaggcggcggaggggcggcggagggggcggcggtccggccaga

SEQ ID NO: 7289 - DNA, 55 bp, Artificial Sequence
  Synthetic polynucleotide
ccacacagcagcggacctcgggggcggcagcggacctcgggggcggcggcgccca

SEQ ID NO: 7290 - DNA, 55 bp, Artificial Sequence
  Synthetic polynucleotide
gccggcggctttggcggcgtgtgctgtgcctggtgttcgtcggtcaccctctgga

SEQ ID NO: 7291 - DNA, 55 bp, Artificial Sequence
  Synthetic polynucleotide
gccgcttctacccaacggttaccgttaccgtggtcatcgctgacgacagcgacaa

SEQ ID NO: 7292 - DNA, 55 bp, Artificial Sequence
  Synthetic polynucleotide
ggcgcggcggccgccagagcgcgcggggcgcggggcgcggggcgcgggcatggcg

SEQ ID NO: 7293 - DNA, 55 bp, Artificial Sequence
  Synthetic polynucleotide
tcaccgataggcatgaagggctgggaggcaagggctgggaggcagggctgggcct

SEQ ID NO: 7294 - DNA, 55 bp, Artificial Sequence
  Synthetic polynucleotide
aaatagaatttgaaaacttgtctcgtctccaggaagtgttattatattcaggtat

SEQ ID NO: 7295 - DNA, 55 bp, Artificial Sequence
  Synthetic polynucleotide
ggtagagattcatgtcaaggagatagatagtgggggaccccatgttactgaagtg

SEQ ID NO: 7296 - DNA, 55 bp, Artificial Sequence
  Synthetic polynucleotide
ccccgtgatgggtgccattgacatgggcatgggcatgggctcaggggtggacagc

SEQ ID NO: 7297 - DNA, 55 bp, Artificial Sequence
  Synthetic polynucleotide
cctggaagaactgctccacagggttcattcaggtcaggaagcaggtcgtccttcg

SEQ ID NO: 7298 - DNA, 55 bp, Artificial Sequence
  Synthetic polynucleotide
gcagtgctggaagctggaactctgggactctgggagctctggacctggaagtact

SEQ ID NO: 7299 - DNA, 55 bp, Artificial Sequence
  Synthetic polynucleotide
acttcctcttcttctcatgtctccggtctccggtaggccacgtgcatggccacta

SEQ ID NO: 7300 - DNA, 55 bp, Artificial Sequence
  Synthetic polynucleotide
tcagcttcaggttgaatttccagcttcaggtggaatttccagctccaggtgtaac

SEQ ID NO: 7301 - DNA, 55 bp, Artificial Sequence
  Synthetic polynucleotide
aacgggagcttcaagttcttaggtattcttaggtacatcatgtattcatatgact

SEQ ID NO: 7302 - DNA, 55 bp, Artificial Sequence
  Synthetic polynucleotide
cgggctgcccggcgaggtgttcgggcgctcaggtgttcgggcgctcggagcaata

SEQ ID NO: 7303 - DNA, 55 bp, Artificial Sequence
  Synthetic polynucleotide
agaggcggcctctgaagaacagaacagaacaggtaggtgtcaagtgggactagtt

SEQ ID NO: 7304 - DNA, 55 bp, Artificial Sequence
  Synthetic polynucleotide
tcttcctttgcctgggggtcttcctttgcctgggggtcttccttctatggaagaa

SEQ ID NO: 7305 - DNA, 55 bp, Artificial Sequence
  Synthetic polynucleotide
acctgcagccagctctgcgtgaaccgaacctggagggtggctacaagtgccagtg

SEQ ID NO: 7306 - DNA, 55 bp, Artificial Sequence
  Synthetic polynucleotide
caaagtaagacctccggatggttttggttttggtggaggaagtgataattaatat

SEQ ID NO: 7307 - DNA, 55 bp, Artificial Sequence
  Synthetic polynucleotide
ccaatccagctacctcagagcagttctggctggcaacaccatcattccatccaac

SEQ ID NO: 7308 - DNA, 55 bp, Artificial Sequence
  Synthetic polynucleotide
ctccaagtcccagggtgccgtggggctggctggctggcgtcctgctggttgcact

SEQ ID NO: 7309 - DNA, 55 bp, Artificial Sequence
  Synthetic polynucleotide
tggggcgagtgctgctgctgctcgctgtagtggctgctcgctgtagtggctgggg

SEQ ID NO: 7310 - DNA, 55 bp, Artificial Sequence
  Synthetic polynucleotide
cagccagcagcagcagcaggagggtcaagcagggtcagcctggaggccatctggg

SEQ ID NO: 7311 - DNA, 55 bp, Artificial Sequence
  Synthetic polynucleotide
gtcctgtcttttaaaactgtcttttaaaactggcatcatttccctgtgtaaagca

SEQ ID NO: 7312 - DNA, 55 bp, Artificial Sequence
  Synthetic polynucleotide
ccacgtgcgccacggcgttggtcagcgcgttggtcagcgcgtcggccaccttctt

SEQ ID NO: 7313 - DNA, 55 bp, Artificial Sequence
  Synthetic polynucleotide
ttattggttgaattcccagcaacaggcaacaggtggtgtgattccatcttggcaa

SEQ ID NO: 7314 - DNA, 55 bp, Artificial Sequence
  Synthetic polynucleotide
agtgctttcactagacaatataaataaatctggctgtagatcaagacggttaact

SEQ ID NO: 7315 - DNA, 55 bp, Artificial Sequence
  Synthetic polynucleotide
cgcttgacgtagggcacatctgggtgcatctgggtgatacttgggtggcttgaac

SEQ ID NO: 7316 - DNA, 55 bp, Artificial Sequence
  Synthetic polynucleotide
cattaagccaaagaataggcacaatagaataggcacaatatagttcctcttcaga

SEQ ID NO: 7317 - DNA, 55 bp, Artificial Sequence
  Synthetic polynucleotide
caggctgggtggcccggaggctgggcggcccggaggctgggctgggcgagtatct

SEQ ID NO: 7318 - DNA, 55 bp, Artificial Sequence
  Synthetic polynucleotide
tgaggatactgtcaccatcagcctcaatcaaggtcaccctgacgaatctcatctc

SEQ ID NO: 7319 - DNA, 55 bp, Artificial Sequence
  Synthetic polynucleotide
aggagcaatgttcctttagttgggattagttgggactgggggccttcctttccta

SEQ ID NO: 7320 - DNA, 55 bp, Artificial Sequence
  Synthetic polynucleotide
agaagagtaggttggggttgggtttgggtttgggcttccgctcggcctgctcaaa

SEQ ID NO: 7321 - DNA, 55 bp, Artificial Sequence
  Synthetic polynucleotide
cgacgcccgccttgggggcgaggcggggcgaggcggcccggggggcctcgggcgg

SEQ ID NO: 7322 - DNA, 55 bp, Artificial Sequence
  Synthetic polynucleotide
cggcgcccagcagtgcctgcgcgatctgcgcggcagcgcgatctgcgcggcagcg

SEQ ID NO: 7323 - DNA, 55 bp, Artificial Sequence
  Synthetic polynucleotide
gcttacccaaagccttgactgttgagcagccgggccttgtttgcagtccacgaag

SEQ ID NO: 7324 - DNA, 55 bp, Artificial Sequence
  Synthetic polynucleotide
gtatgtgaacaggaagaaaagtatgtgaacaggaagaaaagtatgaaattcctga

SEQ ID NO: 7325 - DNA, 55 bp, Artificial Sequence
  Synthetic polynucleotide
gattgtggtcgtctatgtgctgtgctgtgctgggcacccttcttcctggtgcagc

SEQ ID NO: 7326 - DNA, 55 bp, Artificial Sequence
  Synthetic polynucleotide
tgatgcgcattacgtcctcgctgcggcatgcggttgatgacgcccgccagccccg

SEQ ID NO: 7327 - DNA, 55 bp, Artificial Sequence
  Synthetic polynucleotide
gtggttgggatggggctggctggggctggctggggccttcctggcccattatgtg

SEQ ID NO: 7328 - DNA, 55 bp, Artificial Sequence
  Synthetic polynucleotide
gccggtggagaagcagaaggcgctgcatgcaggcctctggctgaagcaggccttc

SEQ ID NO: 7329 - DNA, 55 bp, Artificial Sequence
  Synthetic polynucleotide
ccgcctcacccttgtccgtgcgcctgcctgcggaaggacaacttgcgcttgcgtt

SEQ ID NO: 7330 - DNA, 55 bp, Artificial Sequence
  Synthetic polynucleotide
gcacccagaattagaacatatcatctggtctggacccttttccagcacaccctgc

SEQ ID NO: 7331 - DNA, 55 bp, Artificial Sequence
  Synthetic polynucleotide
gtgatgctctgcaaggtgggcagcagcagcaggaccagctctccaaagcggccac

SEQ ID NO: 7332 - DNA, 55 bp, Artificial Sequence
  Synthetic polynucleotide
cgaattattggattgtcactatatatatataggcaccttcaactcctcttttggc

SEQ ID NO: 7333 - DNA, 55 bp, Artificial Sequence
  Synthetic polynucleotide
tgaaaatgagcagccatttcgaaaggcaggcggcagaagaggaaattaactctct

SEQ ID NO: 7334 - DNA, 55 bp, Artificial Sequence
  Synthetic polynucleotide
tgccgccgatggcaccaggacgtatgggtatggagccagtctcctggtacctgca

SEQ ID NO: 7335 - DNA, 55 bp, Artificial Sequence
  Synthetic polynucleotide
ctcagaaacaaagaactccttgatgcaggcaggatagggatgctgcatctgctcg

SEQ ID NO: 7336 - DNA, 55 bp, Artificial Sequence
  Synthetic polynucleotide
ctgtgttcgccgggacgcattcggggcgggcgggcggcggcggcggcagcggcgg

SEQ ID NO: 7337 - DNA, 55 bp, Artificial Sequence
  Synthetic polynucleotide
gcccaggcctgcagggcttcccgcacattgcggcattgcggttgcgacagtggta

SEQ ID NO: 7338 - DNA, 55 bp, Artificial Sequence
  Synthetic polynucleotide
gattcaggggatgaggccagtggcagagggaggtgaggggacgggtggctcagcc

SEQ ID NO: 7339 - DNA, 55 bp, Artificial Sequence
  Synthetic polynucleotide
ccggccgccagcgcgtccaggtgcggcgtgcggcgtgcggatgcgggagccgtgg

SEQ ID NO: 7340 - DNA, 55 bp, Artificial Sequence
  Synthetic polynucleotide
gacggcccgggagtcgtcggtgcggtggtgcggtcgggcggcgcgggcggcgcgg

SEQ ID NO: 7341 - DNA, 55 bp, Artificial Sequence
  Synthetic polynucleotide
ctccacagtggtcggaggagacgtagaggtcggaggagacgtagagtttgtctgc

SEQ ID NO: 7342 - DNA, 55 bp, Artificial Sequence
  Synthetic polynucleotide
catggcctccagggcaggcatgcactgcactggctgtccaccatcatccccacgc

SEQ ID NO: 7343 - DNA, 55 bp, Artificial Sequence
  Synthetic polynucleotide
ttccttccagacatttttaaggtaattaattggctttaaaaagagaacatatttt

SEQ ID NO: 7344 - DNA, 55 bp, Artificial Sequence
  Synthetic polynucleotide
ttggcctgggaggcagcatacgcgacgcgacggggtcgttgctgacccaagccgt

SEQ ID NO: 7345 - DNA, 55 bp, Artificial Sequence
  Synthetic polynucleotide
gaacttacgcttggtatgttatcgttggcttggtatgttatcgttggtacagacc

SEQ ID NO: 7346 - DNA, 55 bp, Artificial Sequence
  Synthetic polynucleotide
ggaagaatacaggaggcagtggaagaatacaggaggcaggtaagatgttagatgc

SEQ ID NO: 7347 - DNA, 55 bp, Artificial Sequence
  Synthetic polynucleotide
gacgtgagccggcctcggctggtgctgcctcggctggtgctgccgcggctggcgc

SEQ ID NO: 7348 - DNA, 55 bp, Artificial Sequence
  Synthetic polynucleotide
ggagccgctgctgcaattgaggcaaaattgaggcagcggccctccaagtacacgt

SEQ ID NO: 7349 - DNA, 55 bp, Artificial Sequence
  Synthetic polynucleotide
ggacggctgtcctgcgaacatacctagctagggtgatgccattgggccactgaat

SEQ ID NO: 7350 - DNA, 55 bp, Artificial Sequence
  Synthetic polynucleotide
ctgttctcggtgacgtggcgtggcgtggcgtggaaggcagcgatgaggctgcctg

SEQ ID NO: 7351 - DNA, 55 bp, Artificial Sequence
  Synthetic polynucleotide
agccattgtgaggactctcccagccaacgtcggactctcccagccaacgtcgtaa

SEQ ID NO: 7352 - DNA, 55 bp, Artificial Sequence
  Synthetic polynucleotide
agccaggtaatactggctctgaggtgtgtgtggaacacacaacataatgacgtat

SEQ ID NO: 7353 - DNA, 55 bp, Artificial Sequence
  Synthetic polynucleotide
cagtggccttggccacaggctctgggccacaggctctgggcctctgggaggctcc

SEQ ID NO: 7354 - DNA, 55 bp, Artificial Sequence
  Synthetic polynucleotide
taggcaatcagttcacggggattaccaaccagggaggtacggatcctcttccaag

SEQ ID NO: 7355 - DNA, 55 bp, Artificial Sequence
  Synthetic polynucleotide
agggaacaccagctggctgggaacaccagctggctgatgagcctggagaacccgc

SEQ ID NO: 7356 - DNA, 55 bp, Artificial Sequence
  Synthetic polynucleotide
ggggcaggcggcggtgcggcggccgcgcggcggccgcgtgcagatggtgtgcgtg

SEQ ID NO: 7357 - DNA, 55 bp, Artificial Sequence
  Synthetic polynucleotide
acctcaggccttgggcgtcttgtgtcgcccaggccacatcagtgactccatccct

SEQ ID NO: 7358 - DNA, 55 bp, Artificial Sequence
  Synthetic polynucleotide
gcctgtctgaggcgccctccgactgctggctggagccataccctgtgggcttgtc

SEQ ID NO: 7359 - DNA, 55 bp, Artificial Sequence
  Synthetic polynucleotide
cttcctaagtagatccaggcctgtggcatgtggcagccaaggccaagcaggccca

SEQ ID NO: 7360 - DNA, 55 bp, Artificial Sequence
  Synthetic polynucleotide
cggcggcggcggcggcggcggcggcggcggcggcggcagcggccgccacggccac

SEQ ID NO: 7361 - DNA, 55 bp, Artificial Sequence
  Synthetic polynucleotide
agccaaaaacatcctggatgttgcacggcacggcagcttaacgatgcccattaac

SEQ ID NO: 7362 - DNA, 55 bp, Artificial Sequence
  Synthetic polynucleotide
ccaccatgttcttcaggctggctggcaggcaggtaatgggagtataggtagtgat

SEQ ID NO: 7363 - DNA, 55 bp, Artificial Sequence
  Synthetic polynucleotide
agccttcggctgactggctggccacggccacggccgcggcccggggtcgggtaga

SEQ ID NO: 7364 - DNA, 55 bp, Artificial Sequence
  Synthetic polynucleotide
agcacaacccatggctgcgctgggctgcgctgggctgcgcgaggctgaggtgggc

SEQ ID NO: 7365 - DNA, 55 bp, Artificial Sequence
  Synthetic polynucleotide
cgctcctcctggtgcaggaattgggctatggggctatgtcttcaactgacgttcc

SEQ ID NO: 7366 - DNA, 55 bp, Artificial Sequence
  Synthetic polynucleotide
ggtccgcaggagatgagaaggggaggagaaggggaggagaattcgtggagctgcc

SEQ ID NO: 7367 - DNA, 55 bp, Artificial Sequence
  Synthetic polynucleotide
agcagggtgcgggccacagagatggcgggcgggccacagagatggcggaggctgc

SEQ ID NO: 7368 - DNA, 55 bp, Artificial Sequence
  Synthetic polynucleotide
tttagtttacctcatgagtatgaaactgactggtctttcaccacttccacatcat

SEQ ID NO: 7369 - DNA, 55 bp, Artificial Sequence
  Synthetic polynucleotide
acgcaagcgcaagttgtccttccgcaggccaggcgcacggacaagggtgaggcgg

SEQ ID NO: 7370 - DNA, 55 bp, Artificial Sequence
  Synthetic polynucleotide
ctgctgcagggaggcccggatgctgaagggaggcccggatgctgatggacaccgt

SEQ ID NO: 7371 - DNA, 55 bp, Artificial Sequence
  Synthetic polynucleotide
aactttccatgactggatcacagggatcacagggaaaaaccgaccgagctcagga

SEQ ID NO: 7372 - DNA, 55 bp, Artificial Sequence
  Synthetic polynucleotide
gtccttctcctggccggggccgggggccgggggcgcggcaggcgacgaggcccgg

SEQ ID NO: 7373 - DNA, 55 bp, Artificial Sequence
  Synthetic polynucleotide
acctccccaacgcagctgtaaaactggggggggaagaactttccaaaaccctgga

SEQ ID NO: 7374 - DNA, 55 bp, Artificial Sequence
  Synthetic polynucleotide
ggcttgggatcaataaaagctgaggtgctgaggtgatggcagatactgctgtagc

SEQ ID NO: 7375 - DNA, 55 bp, Artificial Sequence
  Synthetic polynucleotide
cggaatcaaaagggtcgaggtaagggaaaagggtcgaggtaagggaaaagcttct

SEQ ID NO: 7376 - DNA, 55 bp, Artificial Sequence
  Synthetic polynucleotide
ggcaatggcagcaagctgggcggggggggggggtgcagccaggatgacagcagat

SEQ ID NO: 7377 - DNA, 55 bp, Artificial Sequence
  Synthetic polynucleotide
aacatcctcaaggaaaaggggatcgtggtggggatcgtggtgggaatcaaggtga

SEQ ID NO: 7378 - DNA, 55 bp, Artificial Sequence
  Synthetic polynucleotide
ggtatcacactccccatggtgatgcaagcaaggtctccctgaaactgacaggtgg

SEQ ID NO: 7379 - DNA, 55 bp, Artificial Sequence
  Synthetic polynucleotide
ggaaggcgaccacggcgcgcgcgcgcgcgcaggatcgactcgtgtttgttgatgg

SEQ ID NO: 7380 - DNA, 55 bp, Artificial Sequence
  Synthetic polynucleotide
agaaatctctactgaagaggaaaaggataaaggatactggagatctaaaagatag

SEQ ID NO: 7381 - DNA, 55 bp, Artificial Sequence
  Synthetic polynucleotide
cagcggcggcggggaccgcgggggcggcggcggcggcagagtagccctaaccgct

SEQ ID NO: 7382 - DNA, 55 bp, Artificial Sequence
  Synthetic polynucleotide
cggccaggtgaactgtgtggtgatgcgacgaggccttaacgaggatgaactcctg

SEQ ID NO: 7383 - DNA, 55 bp, Artificial Sequence
  Synthetic polynucleotide
cggcggcagcggcagcggcggcagctgcagcggcggcagctggaggcctggctgc

SEQ ID NO: 7384 - DNA, 55 bp, Artificial Sequence
  Synthetic polynucleotide
acgctggttatggcctgcacagactggttatggcctgcacagaagccttcttccc

SEQ ID NO: 7385 - DNA, 55 bp, Artificial Sequence
  Synthetic polynucleotide
tcggtactgctggctacgcaggcaggcaggcggccctgcagaggaggctcaggta

SEQ ID NO: 7386 - DNA, 55 bp, Artificial Sequence
  Synthetic polynucleotide
ggcagtataatccaaagatggtcaaggtcaaggtcgcaaggtatgtatgacattt

SEQ ID NO: 7387 - DNA, 55 bp, Artificial Sequence
  Synthetic polynucleotide
tctaccgggggactttaggcagaggctggctggctataaatggagcttgactcga

SEQ ID NO: 7388 - DNA, 55 bp, Artificial Sequence
  Synthetic polynucleotide
gaggtcctggctgacgacgttccgacgttccggagattgaagaggtgagaggact

SEQ ID NO: 7389 - DNA, 55 bp, Artificial Sequence
  Synthetic polynucleotide
gggactggtctggccgacagttggatggataggtggctgcaaggtatccttcaga

SEQ ID NO: 7390 - DNA, 55 bp, Artificial Sequence
  Synthetic polynucleotide
gggcatagagggcggcgatgatagacaggtcggcgatgatagacaggtcggccac

SEQ ID NO: 7391 - DNA, 55 bp, Artificial Sequence
  Synthetic polynucleotide
gaaaactgcggtatgggcggggccagggcggggccagggtgggggcggggcgtcc

SEQ ID NO: 7392 - DNA, 55 bp, Artificial Sequence
  Synthetic polynucleotide
agtcccggctacagaatggctcctctcctcgggatggtcgatcacaactggggag

SEQ ID NO: 7393 - DNA, 55 bp, Artificial Sequence
  Synthetic polynucleotide
ctggcgggggaacacgctgaagcgcacgcacggccgtgctcctggccctcgcggc

SEQ ID NO: 7394 - DNA, 55 bp, Artificial Sequence
  Synthetic polynucleotide
gctggtgggcccaatgcaggcctcacacacaggccattggctacctcctgggcat

SEQ ID NO: 7395 - DNA, 55 bp, Artificial Sequence
  Synthetic polynucleotide
gaaatggtccaacagaaaaaagagggaaagagggccccattccaccagatgcaca

SEQ ID NO: 7396 - DNA, 55 bp, Artificial Sequence
  Synthetic polynucleotide
aagcacaccacgttctttggggccatcatcaggctgggtgaagcccctgcatcct

SEQ ID NO: 7397 - DNA, 55 bp, Artificial Sequence
  Synthetic polynucleotide
gctcaatgtcatttcttgccaaggcctgcctggcaccatcccagggccggcccgg

SEQ ID NO: 7398 - DNA, 55 bp, Artificial Sequence
  Synthetic polynucleotide
tctcgggccccgccccgctccgccccgccccggagggatcctcaggccgggccca

SEQ ID NO: 7399 - DNA, 55 bp, Artificial Sequence
  Synthetic polynucleotide
atgccgctctgctcctgaacgtggaaggaaggggtcaagaaaaccattctgcacg

SEQ ID NO: 7400 - DNA, 55 bp, Artificial Sequence
  Synthetic polynucleotide
ggtcttgagacccggtcttgggacggacgcagggctaccgtgcagctgagggtgc

SEQ ID NO: 7401 - DNA, 55 bp, Artificial Sequence
  Synthetic polynucleotide
gtcctccgccccttacccaggaggaggcagaggcagcggcagcagccaggcggct

SEQ ID NO: 7402 - DNA, 55 bp, Artificial Sequence
  Synthetic polynucleotide
cccgggtcggcggccccggggcgacggccccggggcgacgtggagagcaggctgg

SEQ ID NO: 7403 - DNA, 55 bp, Artificial Sequence
  Synthetic polynucleotide
cagtggagttgatgagagccgtacgcaggcaggctgttcccgcagccccaggtgt

SEQ ID NO: 7404 - DNA, 55 bp, Artificial Sequence
  Synthetic polynucleotide
ccacagcccccagcaggggaggcccccagcaggggaggcccacacctgccccagc

SEQ ID NO: 7405 - DNA, 55 bp, Artificial Sequence
  Synthetic polynucleotide
ccagggggtaaagaggcgctaccaggcaggcgggcgggccacggcgcttctgtac

SEQ ID NO: 7406 - DNA, 55 bp, Artificial Sequence
  Synthetic polynucleotide
ttgatgatcttgactctccgtccaaggaggaggaggtgtttcgctttgtacagag

SEQ ID NO: 7407 - DNA, 55 bp, Artificial Sequence
  Synthetic polynucleotide
cacgcgactcgaggctgtgcgggaaatgtgcgggaaatgtcggagacccatcact

SEQ ID NO: 7408 - DNA, 55 bp, Artificial Sequence
  Synthetic polynucleotide
aggcccagcgatctcatcgtttgcgccgcctggacggcgatggagcacatcagcc

SEQ ID NO: 7409 - DNA, 55 bp, Artificial Sequence
  Synthetic polynucleotide
atccaagttctgcacagagtagaagagaagtggtcagcctcaaaaggctgccact

SEQ ID NO: 7410 - DNA, 55 bp, Artificial Sequence
  Synthetic polynucleotide
tggtggccccgactgcaaggacagactgcaaggacaaatctgacgaggaaaactg

SEQ ID NO: 7411 - DNA, 55 bp, Artificial Sequence
  Synthetic polynucleotide
tcaggagcgccctgttctgaaggcaggtgaaggcaggtgcagcatggctggcttc

SEQ ID NO: 7412 - DNA, 55 bp, Artificial Sequence
  Synthetic polynucleotide
tgcgcaagccggtgctcacggccatggccatggggctgctggcgctgctgggtga

SEQ ID NO: 7413 - DNA, 55 bp, Artificial Sequence
  Synthetic polynucleotide
cctcccgtcctcccccagaaaaaggtgcaaaggtgcactgcctcaacatggacag

SEQ ID NO: 7414 - DNA, 55 bp, Artificial Sequence
  Synthetic polynucleotide
agatgaccagcgggatgaagaaggcgaagaaggcgaagaagtcgatggtgaggtt

SEQ ID NO: 7415 - DNA, 55 bp, Artificial Sequence
  Synthetic polynucleotide
tcttcacaggggacagactctggatgactctggatgttctggggagagaggagag

SEQ ID NO: 7416 - DNA, 55 bp, Artificial Sequence
  Synthetic polynucleotide
tactaagggatatttgttcttacaggcaacaggcaacaatgcaggatttggaaca

SEQ ID NO: 7417 - DNA, 55 bp, Artificial Sequence
  Synthetic polynucleotide
gggtggtctttcttgtgctgcatacggagccggagccgctcagcctcctcgatga

SEQ ID NO: 7418 - DNA, 55 bp, Artificial Sequence
  Synthetic polynucleotide
aacgacacctatcatggtgacacttacttatggcccaaaccagcttcctccttgg

SEQ ID NO: 7419 - DNA, 55 bp, Artificial Sequence
  Synthetic polynucleotide
ggggcctcccagccgcagggcggggggggctggcggcgcgcagaccctccgagca

SEQ ID NO: 7420 - DNA, 55 bp, Artificial Sequence
  Synthetic polynucleotide
ctcttggttgcagggatggattatatatattggaatgcaaatctgcaattaaaag

SEQ ID NO: 7421 - DNA, 55 bp, Artificial Sequence
  Synthetic polynucleotide
gcagggccgtcgcgaggctgggccgtcgcgaggctgtgaagctgcttcgccggtg

SEQ ID NO: 7422 - DNA, 55 bp, Artificial Sequence
  Synthetic polynucleotide
tcccacaccaggcaggccagaagcagcagctggccagaagcagcagctggacagc

SEQ ID NO: 7423 - DNA, 55 bp, Artificial Sequence
  Synthetic polynucleotide
gtttcaagttccttttttaaggcctttttaaggcctcttgtgctacaggtggagc

SEQ ID NO: 7424 - DNA, 55 bp, Artificial Sequence
  Synthetic polynucleotide
gcctctcggcgctgctgctgctgctgctgcaggtaccccggatcccctgacttgc

SEQ ID NO: 7425 - DNA, 55 bp, Artificial Sequence
  Synthetic polynucleotide
atgcttggtactcatgataaggatgatataaggatgatatgtcgcgaactttgct

SEQ ID NO: 7426 - DNA, 55 bp, Artificial Sequence
  Synthetic polynucleotide
gcaaggacaaatctgacgacaaatctgacgaggaaaactgcggtatgggcggggc

SEQ ID NO: 7427 - DNA, 55 bp, Artificial Sequence
  Synthetic polynucleotide
tctgcagaccccaagctggcactggtgagctggtgagggacgtctgtatcctgct

SEQ ID NO: 7428 - DNA, 55 bp, Artificial Sequence
  Synthetic polynucleotide
aagcttgactttgtccttgtggatgggggggggctgtgtcctaagccatggccac

SEQ ID NO: 7429 - DNA, 55 bp, Artificial Sequence
  Synthetic polynucleotide
tttttttctgctcccaggcagcggtagtagcggtagtagtggtgttcaattttgc

SEQ ID NO: 7430 - DNA, 55 bp, Artificial Sequence
  Synthetic polynucleotide
agttttcctctgtggacctgaagccttccttggctgaaaccctgagtaaacaaag

SEQ ID NO: 7431 - DNA, 55 bp, Artificial Sequence
  Synthetic polynucleotide
caagagctgggagctggggtccaggattccaggatagtgtactcaaagctggcag

SEQ ID NO: 7432 - DNA, 55 bp, Artificial Sequence
  Synthetic polynucleotide
tttgaagattatgtgatagaaaagctgggctggagcaatgcgggttctttgacga

SEQ ID NO: 7433 - DNA, 55 bp, Artificial Sequence
  Synthetic polynucleotide
atatgcactctgaaggcatccttgctctgaaggcatccttgctggtgaattgaaa

SEQ ID NO: 7434 - DNA, 55 bp, Artificial Sequence
  Synthetic polynucleotide
agcggggcttccgggtgggcggcccgcccgtggcactcctgtaccgctgctgctt

SEQ ID NO: 7435 - DNA, 55 bp, Artificial Sequence
  Synthetic polynucleotide
gaagtccaggatggctgtggagtcctgcctgggtcagcagccaggacaggagggc

SEQ ID NO: 7436 - DNA, 55 bp, Artificial Sequence
  Synthetic polynucleotide
ccgccgtcttcgtgctggcgctcttcgtgctggcgctcttcgtgccgcgcgttaa

SEQ ID NO: 7437 - DNA, 55 bp, Artificial Sequence
  Synthetic polynucleotide
tcggctgtggctgggtgtggctcccctggctgggtgtggctccccgggcagccag

SEQ ID NO: 7438 - DNA, 55 bp, Artificial Sequence
  Synthetic polynucleotide
ccaacatgatcccgggctcccccggcagtacggcagtacggagttagagggtggc

SEQ ID NO: 7439 - DNA, 55 bp, Artificial Sequence
  Synthetic polynucleotide
actctctgtcaactgaaaagagtgccagccaggatatcttcctcttctctaaaca

SEQ ID NO: 7440 - DNA, 55 bp, Artificial Sequence
  Synthetic polynucleotide
cgtgggagcttacggggccaaccaggtaggtggctgtgtacaggtgagcactggc

SEQ ID NO: 7441 - DNA, 55 bp, Artificial Sequence
  Synthetic polynucleotide
gctgactcacttctcctccgaggcggcctgcggcctggcgctccatgcggagcgc

SEQ ID NO: 7442 - DNA, 55 bp, Artificial Sequence
  Synthetic polynucleotide
gcccttccggggtcgccccctgggctctcctgggctcagggttcagcagctccgg

SEQ ID NO: 7443 - DNA, 55 bp, Artificial Sequence
  Synthetic polynucleotide
gcgacagtgacccctggagaccagcatcatcggccggcatcacagcagcactgca

SEQ ID NO: 7444 - DNA, 55 bp, Artificial Sequence
  Synthetic polynucleotide
tacaaaccagcagagttccacacggcatcacggcatttctcaaaatcagagtcct

SEQ ID NO: 7445 - DNA, 55 bp, Artificial Sequence
  Synthetic polynucleotide
cacgtggactctgcgaaacatctcagcacaaggcagcacccttgtgtgcatccat

SEQ ID NO: 7446 - DNA, 55 bp, Artificial Sequence
  Synthetic polynucleotide
gccgcgtcaactgctcgggccgcgggccgcgggctgcggacgctcggtcccgcgc

SEQ ID NO: 7447 - DNA, 55 bp, Artificial Sequence
  Synthetic polynucleotide
tgtaggtgaagttggagacagggacaccgttggagacagggacaccgttggagag

SEQ ID NO: 7448 - DNA, 55 bp, Artificial Sequence
  Synthetic polynucleotide
gagccccaggagccatagctggggcagggcaggggcaggggcccggagcatctgt

SEQ ID NO: 7449 - DNA, 55 bp, Artificial Sequence
  Synthetic polynucleotide
ccctcctgaggcttctgtgctcctggctcctggcttcttacgccgtccaggccaa

SEQ ID NO: 7450 - DNA, 55 bp, Artificial Sequence
  Synthetic polynucleotide
gggccggcacacacctggaaaggtcaggtcaggtccacgaaggccttgaactcct

SEQ ID NO: 7451 - DNA, 55 bp, Artificial Sequence
  Synthetic polynucleotide
cagcagctcggtggagtggagcactcacttcgggcgagcgctcggccagtgcccg

SEQ ID NO: 7452 - DNA, 55 bp, Artificial Sequence
  Synthetic polynucleotide
ggggctccaagcccaaggtggccaagcccaaggtggccacccccaaggtggtgga

SEQ ID NO: 7453 - DNA, 55 bp, Artificial Sequence
  Synthetic polynucleotide
cccggaccaaccgcggggccccggggccccggggccaggcgcgcagcagcaggcg

SEQ ID NO: 7454 - DNA, 55 bp, Artificial Sequence
  Synthetic polynucleotide
cgagcacttcaatgccatgggcaagtacgtgggcaagtacgtggacaagcggctg

SEQ ID NO: 7455 - DNA, 55 bp, Artificial Sequence
  Synthetic polynucleotide
tcacagcctccccgatgctgttggcgtagagggcatgctgttggcgtagagggca

SEQ ID NO: 7456 - DNA, 55 bp, Artificial Sequence
  Synthetic polynucleotide
accactgtctccttggtcagcggaggcgggcggcttgggcttgggtggggccgtg

SEQ ID NO: 7457 - DNA, 55 bp, Artificial Sequence
  Synthetic polynucleotide
gagggtgaacaggaggactcactggttcactggtgagggagacgccccggggcct

SEQ ID NO: 7458 - DNA, 55 bp, Artificial Sequence
  Synthetic polynucleotide
aaatacattttattgatggacatttattgatggacattatagctgctgatgactg

SEQ ID NO: 7459 - DNA, 55 bp, Artificial Sequence
  Synthetic polynucleotide
tttaagtatccattgggacaaagtatccattgggacatgaagttaaccacagtcg

SEQ ID NO: 7460 - DNA, 55 bp, Artificial Sequence
  Synthetic polynucleotide
ccgggtcatggaggcctcgtatgttatgtgaggcaaaacttgcccatgtcctggg

SEQ ID NO: 7461 - DNA, 55 bp, Artificial Sequence
  Synthetic polynucleotide
gaggcgcgtctgtctgcggccgccgtgccgtggccgggtcggccagggcgcccga

SEQ ID NO: 7462 - DNA, 55 bp, Artificial Sequence
  Synthetic polynucleotide
tgcgggtgggcgctgcgcacgtccggtccgtggcgggatcaccactcgcaggccg

SEQ ID NO: 7463 - DNA, 55 bp, Artificial Sequence
  Synthetic polynucleotide
tcagtctactcacatgagcataactaactcaggaagaagagctggttgttggtga

SEQ ID NO: 7464 - DNA, 55 bp, Artificial Sequence
  Synthetic polynucleotide
aagagatctcattatttcaattggttggtaaggatttcagaaaggggatagtgga

SEQ ID NO: 7465 - DNA, 55 bp, Artificial Sequence
  Synthetic polynucleotide
cagctggtgtgggaacgtcagttaggagttaggacttcccctctacctgtgggct

SEQ ID NO: 7466 - DNA, 55 bp, Artificial Sequence
  Synthetic polynucleotide
aacaaaggtgtttcaattcaatacaatacctggaaaaaaatacactattagcatg

SEQ ID NO: 7467 - DNA, 55 bp, Artificial Sequence
  Synthetic polynucleotide
agccccaccagcagccacagtgtgctgctctggaacggctgcatgaacgagtcca

SEQ ID NO: 7468 - DNA, 55 bp, Artificial Sequence
  Synthetic polynucleotide
tgtgatgattgtgagcataacactacatacaggtaagtagcaaataaattcctga

SEQ ID NO: 7469 - DNA, 55 bp, Artificial Sequence
  Synthetic polynucleotide
gtgcggcggaggcgggggtgcggccggggcgggggtgcggccggcgggcctccca

SEQ ID NO: 7470 - DNA, 55 bp, Artificial Sequence
  Synthetic polynucleotide
ccatggcgggtcaggaggagacgtctcaggaggagacgtctcaggatgagaccta

SEQ ID NO: 7471 - DNA, 55 bp, Artificial Sequence
  Synthetic polynucleotide
ttttgtgcatctggtggaatggggccctggtggaatggggccctcttttttctgt

SEQ ID NO: 7472 - DNA, 55 bp, Artificial Sequence
  Synthetic polynucleotide
gttgatggagaccgtgcatttctgcatttctggccgccggctggagggagagcca

SEQ ID NO: 7473 - DNA, 55 bp, Artificial Sequence
  Synthetic polynucleotide
ctgttcacaccgaagctcaaggtggagacaaggtggagacggacatggaatcttc

SEQ ID NO: 7474 - DNA, 55 bp, Artificial Sequence
  Synthetic polynucleotide
ggaagactcctcggcataagtggaccgacctggcgggcagcctgggcagagcggg

SEQ ID NO: 7475 - DNA, 55 bp, Artificial Sequence
  Synthetic polynucleotide
acatccccctctccagcccgggtcggcgggcggccccggggcgacgtggagagca

SEQ ID NO: 7476 - DNA, 55 bp, Artificial Sequence
  Synthetic polynucleotide
caggaccgggcgcggagcctcgcaggggcagggtcgggctcgggctccctaaccg

SEQ ID NO: 7477 - DNA, 55 bp, Artificial Sequence
  Synthetic polynucleotide
attgggtgagagagaagtctcgagaccaccgggataggcaccgagaggtaagaca

SEQ ID NO: 7478 - DNA, 55 bp, Artificial Sequence
  Synthetic polynucleotide
agcactcgcggcctgggcgcggaggagcggaggagcgcaggagcccggttcgcga

SEQ ID NO: 7479 - DNA, 55 bp, Artificial Sequence
  Synthetic polynucleotide
cccgagagtgggcaccaagcggtacgtacatggcacccgaggtgctggacgagca

SEQ ID NO: 7480 - DNA, 55 bp, Artificial Sequence
  Synthetic polynucleotide
cggctctgctcatccccgtcgtgctcgctgaggtcgtgctcgctgaggtcgtgct

SEQ ID NO: 7481 - DNA, 55 bp, Artificial Sequence
  Synthetic polynucleotide
ctgaactcctcgggctcggactacggactacggcaccatgtcctgctccaccttg

SEQ ID NO: 7482 - DNA, 55 bp, Artificial Sequence
  Synthetic polynucleotide
ggagcagccaggggaggtgtcggccggccttggggccgggccgggcgggggcagg

SEQ ID NO: 7483 - DNA, 55 bp, Artificial Sequence
  Synthetic polynucleotide
acgcagaggtgtggaatgaggccgaggccgaggccaaggcggacctccagaaagt

SEQ ID NO: 7484 - DNA, 55 bp, Artificial Sequence
  Synthetic polynucleotide
ggcggcgcgggcggcggcggcggcagcaggcggcagcagcagcggcggcgggagt

SEQ ID NO: 7485 - DNA, 55 bp, Artificial Sequence
  Synthetic polynucleotide
gctgtgatcgccgcatcagcaggggcctgcaggggcaggaccacgtccacctccg

SEQ ID NO: 7486 - DNA, 55 bp, Artificial Sequence
  Synthetic polynucleotide
atctgtgatggcatctacaactggggcaactggggtgaggtcggacatggccagg

SEQ ID NO: 7487 - DNA, 55 bp, Artificial Sequence
  Synthetic polynucleotide
gttcgtggtgccaatcagtggatcaagttttggatcaagtttaagtcagtcagtt

SEQ ID NO: 7488 - DNA, 55 bp, Artificial Sequence
  Synthetic polynucleotide
cgtcttcattggccacttgtgccttgtgcctggccgacctggccgtggctctgtt

SEQ ID NO: 7489 - DNA, 55 bp, Artificial Sequence
  Synthetic polynucleotide
acgctgaggcagcggcggcaggtggaggagtggaggaggagatcctggcgctgaa

SEQ ID NO: 7490 - DNA, 55 bp, Artificial Sequence
  Synthetic polynucleotide
aggcagcgccagccgcggcagcaccagccgcggcagcaccagccgaggccggctc

SEQ ID NO: 7491 - DNA, 55 bp, Artificial Sequence
  Synthetic polynucleotide
ccccgccgcggcgaggagcaaggcgacggacggtccagcgcaatttccagcccca

SEQ ID NO: 7492 - DNA, 55 bp, Artificial Sequence
  Synthetic polynucleotide
aggactcggcaggacacagggtagagagcccggacacagggtagagagcccagtc

SEQ ID NO: 7493 - DNA, 55 bp, Artificial Sequence
  Synthetic polynucleotide
ccgcgagactacgaaggcctgtgggtgctgtgggtgctgagggtgccgtccacca

SEQ ID NO: 7494 - DNA, 55 bp, Artificial Sequence
  Synthetic polynucleotide
ccgggccacgcaccgcctgctgctgctgctgggtaagggcgggcggggggcgccg

SEQ ID NO: 7495 - DNA, 55 bp, Artificial Sequence
  Synthetic polynucleotide
cggcttgggccggggcggtttggggcggtttggggcgcagatagccgtgcagcgc

SEQ ID NO: 7496 - DNA, 55 bp, Artificial Sequence
  Synthetic polynucleotide
cctgctcggacagctccaggtacgtctgtctggtggtcaatcaggcccttgcggt

SEQ ID NO: 7497 - DNA, 55 bp, Artificial Sequence
  Synthetic polynucleotide
tcggaatgtaacttttgaggacgctgacgctggggaatatacgtgcttggcgggt

SEQ ID NO: 7498 - DNA, 55 bp, Artificial Sequence
  Synthetic polynucleotide
ccacccttacgtagatcggctgctgcagatcggctgctgcgccaggagctggagg

SEQ ID NO: 7499 - DNA, 55 bp, Artificial Sequence
  Synthetic polynucleotide
ccccggcccggcccgcagctctgggctggctggcagcgccagaagtgccaagcag

SEQ ID NO: 7500 - DNA, 55 bp, Artificial Sequence
  Synthetic polynucleotide
accagctgccccagctactggcccagctactggtggaacggagacaaatatctgg

SEQ ID NO: 7501 - DNA, 55 bp, Artificial Sequence
  Synthetic polynucleotide
ggcgggtcgggggcggggctgggctgggctgggctggaaggtgagctcgggaacg

SEQ ID NO: 7502 - DNA, 55 bp, Artificial Sequence
  Synthetic polynucleotide
gccagcttgacattgagcaggtcctgcaagtggtactcctgcaagtggcgggcca

SEQ ID NO: 7503 - DNA, 55 bp, Artificial Sequence
  Synthetic polynucleotide
ggcgcctgctgccactgcccgggaggcatgcggcatgctgggcatgacgggcccg

SEQ ID NO: 7504 - DNA, 55 bp, Artificial Sequence
  Synthetic polynucleotide
gaggccgccaggcgggtcgggggcgggcgggggcggggctgggctggaaggtgag

SEQ ID NO: 7505 - DNA, 55 bp, Artificial Sequence
  Synthetic polynucleotide
cgcggcagctgcggggagagatgactgactggggagcgacccagcacggcgctcc

SEQ ID NO: 7506 - DNA, 55 bp, Artificial Sequence
  Synthetic polynucleotide
cggaagggaaaagggaactcctctcctctatggtcagcttcttctgtactttttc

SEQ ID NO: 7507 - DNA, 55 bp, Artificial Sequence
  Synthetic polynucleotide
ggtctccacgggtggctcctggggccgggccggggctcctctgcccggggctgca

SEQ ID NO: 7508 - DNA, 55 bp, Artificial Sequence
  Synthetic polynucleotide
caaggtgatcagttggtccttctcggtcctcggtcctttgattgtttaataagat

SEQ ID NO: 7509 - DNA, 55 bp, Artificial Sequence
  Synthetic polynucleotide
tgcaggctgagcgagcgcaggcggcgcaggcggcgcaggccctgcagcgagctgg

SEQ ID NO: 7510 - DNA, 55 bp, Artificial Sequence
  Synthetic polynucleotide
aggcgcagggcgggggccgcggcgcgggggcgggggccgcggcgcgggggcgggg

SEQ ID NO: 7511 - DNA, 55 bp, Artificial Sequence
  Synthetic polynucleotide
ccaatggctaagtgaagatgacaatcatgttggacaatcatgttgcagcaattca

SEQ ID NO: 7512 - DNA, 55 bp, Artificial Sequence
  Synthetic polynucleotide
gtggtcctggagaagtggcactgcctgcccaggaactgggaggccggcacgtcca

SEQ ID NO: 7513 - DNA, 55 bp, Artificial Sequence
  Synthetic polynucleotide
tccatgttgctgacccggtagtagggtagtaggtctgctgggagaagtagaggcg

SEQ ID NO: 7514 - DNA, 55 bp, Artificial Sequence
  Synthetic polynucleotide
tccacgtgaacttgagcactgtgagcactgtggggattctccgtgctctggactc

SEQ ID NO: 7515 - DNA, 55 bp, Artificial Sequence
  Synthetic polynucleotide
tttttctcaaatgtttagggtgactgactgtggtaataaccactgacatcacagt

SEQ ID NO: 7516 - DNA, 55 bp, Artificial Sequence
  Synthetic polynucleotide
ttaggtcttgtcggctgcagcagcagcagctggtgtatctgtagcctttggagca

SEQ ID NO: 7517 - DNA, 55 bp, Artificial Sequence
  Synthetic polynucleotide
gcacaggggcgcgcggcgcacgggtccgcgcggcgcacgggtccgcgcgctcgcg

SEQ ID NO: 7518 - DNA, 55 bp, Artificial Sequence
  Synthetic polynucleotide
gtaggtgaagctgagcagcagcagcagcaggggcagctggtactggatggccacg

SEQ ID NO: 7519 - DNA, 55 bp, Artificial Sequence
  Synthetic polynucleotide
tcctgttgtttcagatacagccaggctgataggctgatgccctgaagtatgtcgg

SEQ ID NO: 7520 - DNA, 55 bp, Artificial Sequence
  Synthetic polynucleotide
ttcgatccagggcaaggaggtggggttgtggggttcagtgaggacagggctgagc

SEQ ID NO: 7521 - DNA, 55 bp, Artificial Sequence
  Synthetic polynucleotide
ccttaccagccatatcagtctgtgggactgtgggatctggtacagttttgtaaat

SEQ ID NO: 7522 - DNA, 55 bp, Artificial Sequence
  Synthetic polynucleotide
tgttggtcctgctggtgctgttggccctgctggtgctgttggcccaagaggtcct

SEQ ID NO: 7523 - DNA, 55 bp, Artificial Sequence
  Synthetic polynucleotide
agaatacagtgggcagagacaggtaggtactgggccacgatggggctgcaaggaa

SEQ ID NO: 7524 - DNA, 55 bp, Artificial Sequence
  Synthetic polynucleotide
acccctccactgttacaagcagctgggcctgggcctgggcctgcctagaggtctg

SEQ ID NO: 7525 - DNA, 55 bp, Artificial Sequence
  Synthetic polynucleotide
cgactgcaaggacaaatctgacatctgacgaggaaaactgcggtatgggcggggc

SEQ ID NO: 7526 - DNA, 55 bp, Artificial Sequence
  Synthetic polynucleotide
acgtggctgaagaaagcaagagtggtggtgaggcttggagaagtaccctacaagg

SEQ ID NO: 7527 - DNA, 55 bp, Artificial Sequence
  Synthetic polynucleotide
gcgcacggctggccgtaggcggcgggcggcgggcggcgcggcggcgtagggcagc

SEQ ID NO: 7528 - DNA, 55 bp, Artificial Sequence
  Synthetic polynucleotide
agagaagtcatccagggctggggcagggctggggcagggctgggggcggggcagg

SEQ ID NO: 7529 - DNA, 55 bp, Artificial Sequence
  Synthetic polynucleotide
tggtgaagtcgtgctgaagatgaaagaaagtggaagggatgacctgccattcatg

SEQ ID NO: 7530 - DNA, 55 bp, Artificial Sequence
  Synthetic polynucleotide
gggcccgggggcccgggaggcgaaccccccgggaggcgaacccggcaagggcggc

SEQ ID NO: 7531 - DNA, 55 bp, Artificial Sequence
  Synthetic polynucleotide
tgccctgggccgggctgcccggctcgtccccggctcgtcgccgcctccgacgccc

SEQ ID NO: 7532 - DNA, 55 bp, Artificial Sequence
  Synthetic polynucleotide
cggccgcggctgcggcggcggccgcggctgcggcggcggccgcggccaaccagtg

SEQ ID NO: 7533 - DNA, 55 bp, Artificial Sequence
  Synthetic polynucleotide
gccccgactgcaaggacaaatctgactgcaaggacaaatctgacgaggaaaactg

SEQ ID NO: 7534 - DNA, 55 bp, Artificial Sequence
  Synthetic polynucleotide
gcggccgcaaccggggcactgcagctaccggggcactgcagctgccgccgccgca

SEQ ID NO: 7535 - DNA, 55 bp, Artificial Sequence
  Synthetic polynucleotide
tgagccaagcactcacgtccatgtagtagttggtgaggatcacggaggaggtggt

SEQ ID NO: 7536 - DNA, 55 bp, Artificial Sequence
  Synthetic polynucleotide
tatactggcggatgtgctctggcgagtagatggcgagtagatggagagcagctgg

SEQ ID NO: 7537 - DNA, 55 bp, Artificial Sequence
  Synthetic polynucleotide
gttttaatgatgccaaggagaaaggtgaggtggtgacaaaggtgagccactagct

SEQ ID NO: 7538 - DNA, 55 bp, Artificial Sequence
  Synthetic polynucleotide
aatggccaaccctattattgggaatgggaatggtggagctcctgatactactgct

SEQ ID NO: 7539 - DNA, 55 bp, Artificial Sequence
  Synthetic polynucleotide
cacggagggcagggaggcgcgcacgctcggaggcgcgcacgctcacaggcacctg

SEQ ID NO: 7540 - DNA, 55 bp, Artificial Sequence
  Synthetic polynucleotide
cactttctgataggcagcctgcactggtggtggggtgaattctttgccaaagtga

SEQ ID NO: 7541 - DNA, 55 bp, Artificial Sequence
  Synthetic polynucleotide
ttgttctcgggcagcttctggtctgtctgtaggaattgcacctcacctagaagag

SEQ ID NO: 7542 - DNA, 55 bp, Artificial Sequence
  Synthetic polynucleotide
ggagccaggagcacggcagcgggccctcagcgggccctcagcgcagtcagcgtcc

SEQ ID NO: 7543 - DNA, 55 bp, Artificial Sequence
  Synthetic polynucleotide
cttggacgaaaatgcttggacgaaaatgcttggtgagctggggatctcctgcccc

SEQ ID NO: 7544 - DNA, 55 bp, Artificial Sequence
  Synthetic polynucleotide
agcgcatccagtcgccgatgaagagaagaacgggagcatgttgatggcagactcg

SEQ ID NO: 7545 - DNA, 55 bp, Artificial Sequence
  Synthetic polynucleotide
catccagcctgctctccacgtcgcccgccccggggccgccgacccgggctggaga

SEQ ID NO: 7546 - DNA, 55 bp, Artificial Sequence
  Synthetic polynucleotide
aactgagccagctgcagacggagctgcagacggagctcctggcggccctgctcga

SEQ ID NO: 7547 - DNA, 55 bp, Artificial Sequence
  Synthetic polynucleotide
agctgcgagagagccaaaaaggccatgcatgggctaccagccactagtgaccatg

SEQ ID NO: 7548 - DNA, 55 bp, Artificial Sequence
  Synthetic polynucleotide
gcatttctgccgggccgtgtgccgccccgccgggccgagagacggtaagagggct

SEQ ID NO: 7549 - DNA, 55 bp, Artificial Sequence
  Synthetic polynucleotide
cggggccccaggggcccccacactacgctggggcccccacactacaccgaccagc

SEQ ID NO: 7550 - DNA, 55 bp, Artificial Sequence
  Synthetic polynucleotide
tctgccatagcagctggcagctgctgctgctggcagctgctgctgctggaagaag

SEQ ID NO: 7551 - DNA, 55 bp, Artificial Sequence
  Synthetic polynucleotide
ggtggccccgactgcaaggacaaatctgacaggacaaatctgacgaggaaaactg

SEQ ID NO: 7552 - DNA, 55 bp, Artificial Sequence
  Synthetic polynucleotide
tccggcctttagtctcaggaactttgaatcaggaactttgaagtaggtgaagatg

SEQ ID NO: 7553 - DNA, 55 bp, Artificial Sequence
  Synthetic polynucleotide
cagtggtagtcaggccagtgacaatgagtcaggccagtgacaatgagggacattc

SEQ ID NO: 7554 - DNA, 55 bp, Artificial Sequence
  Synthetic polynucleotide
ggaggtcaatgggttccttctgaatgatgatggtcctggtgcctgggaagtgggc

SEQ ID NO: 7555 - DNA, 55 bp, Artificial Sequence
  Synthetic polynucleotide
cgggtttcaggattcactttcttcctgcctgggaacgaaccctctatttaccagg

SEQ ID NO: 7556 - DNA, 55 bp, Artificial Sequence
  Synthetic polynucleotide
ctgcagcagcgccgcgggagcgagggagcgagggagccagggctgcgggtgtggc

SEQ ID NO: 7557 - DNA, 55 bp, Artificial Sequence
  Synthetic polynucleotide
gaagccatcaatgagctcactgttctgttctggtgctggttaacaccatttactt

SEQ ID NO: 7558 - DNA, 55 bp, Artificial Sequence
  Synthetic polynucleotide
ggttttctcctcaggggtctctcttttttttggcatgtcggccctgttactccct

SEQ ID NO: 7559 - DNA, 55 bp, Artificial Sequence
  Synthetic polynucleotide
tggagtagaggtgggccacagaggccgcagaggccgcaaaggccaccacgtcctc

SEQ ID NO: 7560 - DNA, 55 bp, Artificial Sequence
  Synthetic polynucleotide
cagttccaccttcaccgtcaccgtccgtccggggcctgcggggagacagacgcgg

SEQ ID NO: 7561 - DNA, 55 bp, Artificial Sequence
  Synthetic polynucleotide
ccccatgaatatgaacatgggtatgaacatgggtatgaacatggcagcagccgcg

SEQ ID NO: 7562 - DNA, 55 bp, Artificial Sequence
  Synthetic polynucleotide
ggtctactttggtcaaaacgaatatgaatatggttctccttccatgagggtccat

SEQ ID NO: 7563 - DNA, 55 bp, Artificial Sequence
  Synthetic polynucleotide
ggcgcgtggccgtggaggaggtggatgaggtggatgaggagggcaagtttgtccg

SEQ ID NO: 7564 - DNA, 55 bp, Artificial Sequence
  Synthetic polynucleotide
tgttggtcctgctggtgctgttggtcctgctggtgctgttggcccaagaggtcct

SEQ ID NO: 7565 - DNA, 55 bp, Artificial Sequence
  Synthetic polynucleotide
aaataaataaaccaacctggagcgtgagtgaggtaatcagccaggatctggatag

SEQ ID NO: 7566 - DNA, 55 bp, Artificial Sequence
  Synthetic polynucleotide
gtgatgttgggagtgcaggactaaagggtagggtgacaaggtgagtgtgggcatg

SEQ ID NO: 7567 - DNA, 55 bp, Artificial Sequence
  Synthetic polynucleotide
gatctcccggagcggaggggacaggcaggcaggccaggtggaaggcccgagggca

SEQ ID NO: 7568 - DNA, 55 bp, Artificial Sequence
  Synthetic polynucleotide
tcaatgaacttacgcttggtatgttatccttggtatgttatcgttggtacagacc

SEQ ID NO: 7569 - DNA, 55 bp, Artificial Sequence
  Synthetic polynucleotide
gggcttcatgcagctgcctgactcggtcctcggtcctcgacggccacctgggagg

SEQ ID NO: 7570 - DNA, 55 bp, Artificial Sequence
  Synthetic polynucleotide
aggccagctcattgttgtcaatgacggaggaggcagcagccacgtccaggggcgt

SEQ ID NO: 7571 - DNA, 55 bp, Artificial Sequence
  Synthetic polynucleotide
catagtgagccgagaggccgaggcggccggaggccgaggagccgtggggcgagga

SEQ ID NO: 7572 - DNA, 55 bp, Artificial Sequence
  Synthetic polynucleotide
gggtgcctgcatgggggaacgccggagaattggagaattaccatccccccgcacc

SEQ ID NO: 7573 - DNA, 55 bp, Artificial Sequence
  Synthetic polynucleotide
ccgcagcttcccgggccgcggcagcggcagcggcggcggcggccgccagggaccc

SEQ ID NO: 7574 - DNA, 55 bp, Artificial Sequence
  Synthetic polynucleotide
ggcactggtccaccacatccacagacagacaggttctggttggtcagagccgctt

SEQ ID NO: 7575 - DNA, 55 bp, Artificial Sequence
  Synthetic polynucleotide
ccctcaccttggaggatgaggcgatggcgatggagtagtagcgggcctgcaggcg

SEQ ID NO: 7576 - DNA, 55 bp, Artificial Sequence
  Synthetic polynucleotide
tagctgaggggcagtgtcagcgaggaagcgaggaagcgagatcgtggctggactg

SEQ ID NO: 7577 - DNA, 55 bp, Artificial Sequence
  Synthetic polynucleotide
taccaggctgagctgcgagagctgcggctgcggctgcggctcgatcaactcaccg

SEQ ID NO: 7578 - DNA, 55 bp, Artificial Sequence
  Synthetic polynucleotide
aagagaattctcttaccaacatctggtcaatggtcaataaattccttcaagacca

SEQ ID NO: 7579 - DNA, 55 bp, Artificial Sequence
  Synthetic polynucleotide
cagaccagcacgttgcccaggagctagctgtgggaggaagataagaggtatgaac

SEQ ID NO: 7580 - DNA, 55 bp, Artificial Sequence
  Synthetic polynucleotide
cgcctcgcgcagcgctcgtggcagcggcggcggcagctgcagcagcagcagcagc

SEQ ID NO: 7581 - DNA, 55 bp, Artificial Sequence
  Synthetic polynucleotide
atacctgtaattcaccaaaggatgactgacaggagcccagcaccatatgccttta

SEQ ID NO: 7582 - DNA, 55 bp, Artificial Sequence
  Synthetic polynucleotide
cgcaagagcatcaacaaatcactagaggagaggagacattttgtattttaggcat

SEQ ID NO: 7583 - DNA, 55 bp, Artificial Sequence
  Synthetic polynucleotide
ccagccaacgtcgtaatcgctggtaatcgctggtgctgaagcctcctgcggccga

SEQ ID NO: 7584 - DNA, 55 bp, Artificial Sequence
  Synthetic polynucleotide
agagacctggagggagctcaccagacagacaggtcagggctgatgatgttcaagc

SEQ ID NO: 7585 - DNA, 55 bp, Artificial Sequence
  Synthetic polynucleotide
gtatttcattgttcgctgaaggggaagggaaggctcgcaagcgatgtagattgaa

SEQ ID NO: 7586 - DNA, 55 bp, Artificial Sequence
  Synthetic polynucleotide
cccgtacctcggtagctgtggatgcggcggcggcccgtgccaggcggcagcgttg

SEQ ID NO: 7587 - DNA, 55 bp, Artificial Sequence
  Synthetic polynucleotide
gcccttgccgggttcgcctcccgggcccccgggcccccgggccccgccgcccccg

SEQ ID NO: 7588 - DNA, 55 bp, Artificial Sequence
  Synthetic polynucleotide
tctccagccaggccatgtacagcgagcagctggggcacttccccttcctccctat

SEQ ID NO: 7589 - DNA, 55 bp, Artificial Sequence
  Synthetic polynucleotide
accctctttataaaagcacagtaggacagtaggaggaaggcgaaatgaaaatttg

SEQ ID NO: 7590 - DNA, 55 bp, Artificial Sequence
  Synthetic polynucleotide
cctcggccgcctcggcctctcggctcactatggctcactatgcgcaccttctgcc

SEQ ID NO: 7591 - DNA, 55 bp, Artificial Sequence
  Synthetic polynucleotide
ggcgcgcagggcggcgcgggcctcccgcgcgggcctcccggcgcaggcggcgctc

SEQ ID NO: 7592 - DNA, 55 bp, Artificial Sequence
  Synthetic polynucleotide
gccctgggctcaggtactcacagatggcggcggcggcggccaggcatttcacaac

SEQ ID NO: 7593 - DNA, 55 bp, Artificial Sequence
  Synthetic polynucleotide
acctgcagccgggcgagcagcgcgcagagcaggagcagcgcgcagagcagcagca

SEQ ID NO: 7594 - DNA, 55 bp, Artificial Sequence
  Synthetic polynucleotide
tgctgcccggccgccggcccgcgggcccgcgggccccgggtcccccgcgacgtcc

SEQ ID NO: 7595 - DNA, 55 bp, Artificial Sequence
  Synthetic polynucleotide
agatcgagctggagatctcggaggcatcggaggcagccagccctggcacgcgcat

SEQ ID NO: 7596 - DNA, 55 bp, Artificial Sequence
  Synthetic polynucleotide
tcccgacagagttatggatgccgaagatgatggagccgttgcaccaggtggcagc

SEQ ID NO: 7597 - DNA, 55 bp, Artificial Sequence
  Synthetic polynucleotide
actgcaaggacaaatctgacgagtctgacgaggaaaactgcggtatgggcggggc

SEQ ID NO: 7598 - DNA, 55 bp, Artificial Sequence
  Synthetic polynucleotide
cttcttctgccccaggagtgaactggtgtctggtgtgagaggaccaccctgagca

SEQ ID NO: 7599 - DNA, 55 bp, Artificial Sequence
  Synthetic polynucleotide
aaattcttccagtcatcttcactaatgtaatggatggtcttgtgtgaccaagtgc

SEQ ID NO: 7600 - DNA, 55 bp, Artificial Sequence
  Synthetic polynucleotide
gtggtacctcataggtgttattggaggtggtggttcgggtgcccttcacaccgtg

SEQ ID NO: 7601 - DNA, 55 bp, Artificial Sequence
  Synthetic polynucleotide
ccagaccaggaacccactcacacttcacactggtcatctctggctcgggacactg

SEQ ID NO: 7602 - DNA, 55 bp, Artificial Sequence
  Synthetic polynucleotide
agttattcaaaagggacatagaaaatcaaaagggacatagaaaagcaagagaatt

SEQ ID NO: 7603 - DNA, 55 bp, Artificial Sequence
  Synthetic polynucleotide
cctctcggggccaggtgccattttggggccaggtgccattttgcttggatgcctg

SEQ ID NO: 7604 - DNA, 55 bp, Artificial Sequence
  Synthetic polynucleotide
ggcatcttcaaacttattcagaacttattcagggctttctcctgtctgtactgaa

SEQ ID NO: 7605 - DNA, 55 bp, Artificial Sequence
  Synthetic polynucleotide
aagatggatgtataactttttggcacaggcaggacaagatctacgtggtcactga

SEQ ID NO: 7606 - DNA, 55 bp, Artificial Sequence
  Synthetic polynucleotide
ggggcgggggcggaggccggggggccgcggcggaggccggggggccgcggcggcc

SEQ ID NO: 7607 - DNA, 55 bp, Artificial Sequence
  Synthetic polynucleotide
gcagacgcgtccggctgcgctgcgctgcgctgggaccaggctcggagccctccgc

SEQ ID NO: 7608 - DNA, 55 bp, Artificial Sequence
  Synthetic polynucleotide
agccgctccaggtctttctgcacatttgggtggtcttccgcacatttgggtggtc

SEQ ID NO: 7609 - DNA, 55 bp, Artificial Sequence
  Synthetic polynucleotide
ttggctgccatgaacttctcctccatcatctggatcttcagggcgtccatctccc

SEQ ID NO: 7610 - DNA, 55 bp, Artificial Sequence
  Synthetic polynucleotide
tgggccaaaaatccccgcttgtgaacactggggtcgcttgtgaacactggggtcg

SEQ ID NO: 7611 - DNA, 55 bp, Artificial Sequence
  Synthetic polynucleotide
tgggcgtcagcctgcgcacgctgcgcacgctggcatggaaccgctccttgaagct

SEQ ID NO: 7612 - DNA, 55 bp, Artificial Sequence
  Synthetic polynucleotide
acggctggagtgtgaggagtgtgaggagtgtggcggcctgggctccccaacaggc

SEQ ID NO: 7613 - DNA, 55 bp, Artificial Sequence
  Synthetic polynucleotide
tatacacatagacacaagggcctgaagcaagggcctgaagcaagtgccagagctg

SEQ ID NO: 7614 - DNA, 55 bp, Artificial Sequence
  Synthetic polynucleotide
ttagggttgcccataacagcatcaggagtcaggagtggacagatccccaaaggac

SEQ ID NO: 7615 - DNA, 55 bp, Artificial Sequence
  Synthetic polynucleotide
ctgaaaaactgagacaaaccccaggatgctaggatgctgcagagcagagtgtatg

SEQ ID NO: 7616 - DNA, 55 bp, Artificial Sequence
  Synthetic polynucleotide
gtggggggccgcatctacattgacgacgacgggctcatctccctagtggtccaga

SEQ ID NO: 7617 - DNA, 55 bp, Artificial Sequence
  Synthetic polynucleotide
tctccacagtgacgggtgtctccacagtgacggctgcccgcatcctcaagggtca

SEQ ID NO: 7618 - DNA, 55 bp, Artificial Sequence
  Synthetic polynucleotide
tccatttaccagcatgcataatgaatgggtgggtgcccagtggtcactatctaac

SEQ ID NO: 7619 - DNA, 55 bp, Artificial Sequence
  Synthetic polynucleotide
tcctggtgcgggagactcgggagctggagctggagctggaggaggagttgtacgc

SEQ ID NO: 7620 - DNA, 55 bp, Artificial Sequence
  Synthetic polynucleotide
cggcacgtgcatcgacggcatcggcggcatcggcagcttcagctgcgactgccgc

SEQ ID NO: 7621 - DNA, 55 bp, Artificial Sequence
  Synthetic polynucleotide
actcctcaccctccagcagcttgcggtggtaggtggcgatctccacgtccagggc

SEQ ID NO: 7622 - DNA, 55 bp, Artificial Sequence
  Synthetic polynucleotide
gagcgggccgcccgaagcagggtgtagtgtaggaagtcacagccacgtccaggag

SEQ ID NO: 7623 - DNA, 55 bp, Artificial Sequence
  Synthetic polynucleotide
caacgccctgctaagcaacatgagcttagcaggatctactccaccgccaaggtct

SEQ ID NO: 7624 - DNA, 55 bp, Artificial Sequence
  Synthetic polynucleotide
ggcctcggccgcctcggcctctcggcctctcggctcactatgcgcaccttctgcc

SEQ ID NO: 7625 - DNA, 55 bp, Artificial Sequence
  Synthetic polynucleotide
aacagcagcgacgcatgtctcgcggtaccgcggtaccttgtcaggtcgcaaggct

SEQ ID NO: 7626 - DNA, 55 bp, Artificial Sequence
  Synthetic polynucleotide
gctccggtgtggcctttgctgtggttgggttggggcctgccaggccctgggtctc

SEQ ID NO: 7627 - DNA, 55 bp, Artificial Sequence
  Synthetic polynucleotide
gaggtcctatcccatgacctatactcactcaggcttcaggttatagtcaaggata

SEQ ID NO: 7628 - DNA, 55 bp, Artificial Sequence
  Synthetic polynucleotide
ggctgtgctgcagcttgatgaggtcagatgaggtcaacttgtattcagcaggtac

SEQ ID NO: 7629 - DNA, 55 bp, Artificial Sequence
  Synthetic polynucleotide
cagcagcgtggtgcggccagtggaagaccgcggccagtggaagaccaccgccagg

SEQ ID NO: 7630 - DNA, 55 bp, Artificial Sequence
  Synthetic polynucleotide
gctacctcagagctgagctgcgaggtgtcgaggtgtcggaggagaactgtgagcg

SEQ ID NO: 7631 - DNA, 55 bp, Artificial Sequence
  Synthetic polynucleotide
gcttctcaaggacaggatggtgaacagggatggtgaacagcaatcttgccagtgt

SEQ ID NO: 7632 - DNA, 55 bp, Artificial Sequence
  Synthetic polynucleotide
gaaggagaacaaggagttgatgagggagggaggtgtttccaaagaattttttcag

SEQ ID NO: 7633 - DNA, 55 bp, Artificial Sequence
  Synthetic polynucleotide
agaattaattacagggctcgtccaactaactggtccctcagtcacacatgccaga

SEQ ID NO: 7634 - DNA, 55 bp, Artificial Sequence
  Synthetic polynucleotide
agagagattgttgaaggccatcacgtatgaaggccatcacgtatgccaaaggatt

SEQ ID NO: 7635 - DNA, 55 bp, Artificial Sequence
  Synthetic polynucleotide
ctattatgcttctcaaggttatgcttctcaaggacaggatggtgaacagcaatct

SEQ ID NO: 7636 - DNA, 55 bp, Artificial Sequence
  Synthetic polynucleotide
ttcgggcaggtgctggggatgctgctgctggggatgctgctgctggactctgtgc

SEQ ID NO: 7637 - DNA, 55 bp, Artificial Sequence
  Synthetic polynucleotide
gtttcgacatggcggtgcagccgaaggaggcggtgcagccgaaggagacgctgca

SEQ ID NO: 7638 - DNA, 55 bp, Artificial Sequence
  Synthetic polynucleotide
gcacccccaggaacatcggggctgcggtgcgggaacttgcacagggagctctgca

SEQ ID NO: 7639 - DNA, 55 bp, Artificial Sequence
  Synthetic polynucleotide
gcagctggtggacccagcccggccaggagcaggagatttcaaccaagcagccatg

SEQ ID NO: 7640 - DNA, 55 bp, Artificial Sequence
  Synthetic polynucleotide
ttactgtagtggccgtagtacatgacatgacggtgtgggtgaagcaaccctgcca

SEQ ID NO: 7641 - DNA, 55 bp, Artificial Sequence
  Synthetic polynucleotide
gctggcctgccgggagccggaggtggacggtggtcctgcccctgcaggtgctgat

SEQ ID NO: 7642 - DNA, 55 bp, Artificial Sequence
  Synthetic polynucleotide
aatggattggcaaggacgcctaccatgcatgggctggctgcactgggagcgcttc

SEQ ID NO: 7643 - DNA, 55 bp, Artificial Sequence
  Synthetic polynucleotide
tctgggtcatttacagcaccgatgacccagaggccaaaggtgccattgtcctctc

SEQ ID NO: 7644 - DNA, 55 bp, Artificial Sequence
  Synthetic polynucleotide
tggcacgccagcggaaatgcttgatttcagcggaaatgcttgatttcttcaatga

SEQ ID NO: 7645 - DNA, 55 bp, Artificial Sequence
  Synthetic polynucleotide
cttgctgaattgactaatctggatcctatctggatcctcaaagggaaacacctca

SEQ ID NO: 7646 - DNA, 55 bp, Artificial Sequence
  Synthetic polynucleotide
gcctcttaaaacgctcatagagtaactaactggttgtgcagtaaaagcaactggt

SEQ ID NO: 7647 - DNA, 55 bp, Artificial Sequence
  Synthetic polynucleotide
cttcagcagtgtgccggccagccggcccgccggcccagcgagcagctgctgcagc

SEQ ID NO: 7648 - DNA, 55 bp, Artificial Sequence
  Synthetic polynucleotide
gggcggcgcggcggcgtagggcagcgccagcggcgtagggcagcgccagcggcgg

SEQ ID NO: 7649 - DNA, 55 bp, Artificial Sequence
  Synthetic polynucleotide
tcagcagcctcaccagtgtgggcttcgtgtgggcttcggcaacgtctctcccaac

SEQ ID NO: 7650 - DNA, 55 bp, Artificial Sequence
  Synthetic polynucleotide
ggcactcaccggtggtcctgccggaggcggaggcgtagagggacagcacggcctg

SEQ ID NO: 7651 - DNA, 55 bp, Artificial Sequence
  Synthetic polynucleotide
gctgcaactccatccgggtggagagcggcgcggctgctggatgctctatgagcgt

SEQ ID NO: 7652 - DNA, 55 bp, Artificial Sequence
  Synthetic polynucleotide
aagcaacttcaggatgagatgctgcggcggcgggtggatgctgagaacaggctgc

SEQ ID NO: 7653 - DNA, 55 bp, Artificial Sequence
  Synthetic polynucleotide
caaggcaacctttgatgaggaggaaggatgaggaggaaggtcgggatgaatacga

SEQ ID NO: 7654 - DNA, 55 bp, Artificial Sequence
  Synthetic polynucleotide
caaagggaagagatgcaaatgggtggggggtggggggtgggaccctcccccagcc

SEQ ID NO: 7655 - DNA, 55 bp, Artificial Sequence
  Synthetic polynucleotide
tcatgggagtgcccttgttgaggtgttgttgggacaggtgggactggttgaggcc

SEQ ID NO: 7656 - DNA, 55 bp, Artificial Sequence
  Synthetic polynucleotide
tgcatacctaatcattatgctgaggatttgaggatttggaaagggtgtttattcc

SEQ ID NO: 7657 - DNA, 55 bp, Artificial Sequence
  Synthetic polynucleotide
gccctcaccttgaccaaaagcaggaagagcaggaagagcagcgaggccgccaggc

SEQ ID NO: 7658 - DNA, 55 bp, Artificial Sequence
  Synthetic polynucleotide
ggcgcagcgcaaaggggcggacgctgagggcggacgctgagggcggccagggcgc

SEQ ID NO: 7659 - DNA, 55 bp, Artificial Sequence
  Synthetic polynucleotide
cccggcaggtaggccccttgcaatgtgggtgggctctcacacgtgcaggtcacca

SEQ ID NO: 7660 - DNA, 55 bp, Artificial Sequence
  Synthetic polynucleotide
tacagtactcccaccgcacttggctgttgttggttgtatggcaccatggggccct

SEQ ID NO: 7661 - DNA, 55 bp, Artificial Sequence
  Synthetic polynucleotide
ctcacaccccacagggtggagggtggagggtggaacgtgcggctgcgtggacctc

SEQ ID NO: 7662 - DNA, 55 bp, Artificial Sequence
  Synthetic polynucleotide
gcagaaccatggcattttatagctgcttgctgggtcctcttggcactcacctggc

SEQ ID NO: 7663 - DNA, 55 bp, Artificial Sequence
  Synthetic polynucleotide
cacacaggtaggcggtggcggtgccggtgccggcactgtcagggacctgggcatt

SEQ ID NO: 7664 - DNA, 55 bp, Artificial Sequence
  Synthetic polynucleotide
tctgtgctctcgtggaaactgtccacaacacgggctgccagtgtgcacttggcgg

SEQ ID NO: 7665 - DNA, 55 bp, Artificial Sequence
  Synthetic polynucleotide
aggatatgatatcatggaaccagcagcacatggaaccagcagcaaagaagtgcta

SEQ ID NO: 7666 - DNA, 55 bp, Artificial Sequence
  Synthetic polynucleotide
ccattccactgcatggttcactctgaacggaggttcactctgaacggagctggca

SEQ ID NO: 7667 - DNA, 55 bp, Artificial Sequence
  Synthetic polynucleotide
ccccggcgcggctgctgcgcggcggctgcgcggcggctggacgagtcgctgtctg

SEQ ID NO: 7668 - DNA, 55 bp, Artificial Sequence
  Synthetic polynucleotide
gtggcgatgccgctgtccgaggagcgtccgaggagctctggcggccaacctcctg

SEQ ID NO: 7669 - DNA, 55 bp, Artificial Sequence
  Synthetic polynucleotide
tgagccccgacgagtccgactccggtactccggtgaggcctggcctgagctgggg

SEQ ID NO: 7670 - DNA, 55 bp, Artificial Sequence
  Synthetic polynucleotide
caccacggtggactttggaacagaattttcaggttggtgtttgtagtaacagaaa

SEQ ID NO: 7671 - DNA, 55 bp, Artificial Sequence
  Synthetic polynucleotide
tcctggcagccaacagcatgattgacagacaggaagccgcgcctgctcttcccca

SEQ ID NO: 7672 - DNA, 55 bp, Artificial Sequence
  Synthetic polynucleotide
agcttgctggaggcgggcgaggagcggccgaggagcggccgggggagcaaagcca

SEQ ID NO: 7673 - DNA, 55 bp, Artificial Sequence
  Synthetic polynucleotide
aggcggctcccaagacattcacgtggttcgtggttcactttcacggccagacctt

SEQ ID NO: 7674 - DNA, 55 bp, Artificial Sequence
  Synthetic polynucleotide
cttcaacaactatgacccaggaagccgagccggccagtgcgggagcctgaggata

SEQ ID NO: 7675 - DNA, 55 bp, Artificial Sequence
  Synthetic polynucleotide
ctgaaacccgatgaagatgcccaccacccacggaataattcatctcggaaagaga

SEQ ID NO: 7676 - DNA, 55 bp, Artificial Sequence
  Synthetic polynucleotide
cttctagtccttcttggaatggccttggaatggccttggaagcatccctagcaca

SEQ ID NO: 7677 - DNA, 55 bp, Artificial Sequence
  Synthetic polynucleotide
tcgtagagggagccgtgctcgtggtgctcgtggtagtgcgtgatgagccacagct

SEQ ID NO: 7678 - DNA, 55 bp, Artificial Sequence
  Synthetic polynucleotide
tgtagtgtgctcaaaagacaaggttacttacggagaaggcttccgctggatggca

SEQ ID NO: 7679 - DNA, 55 bp, Artificial Sequence
  Synthetic polynucleotide
gggccccgaaatggtgctgctgccccgaaatggtgctgctgcgcttggagcacca

SEQ ID NO: 7680 - DNA, 55 bp, Artificial Sequence
  Synthetic polynucleotide
ctgtgatcaaagttttgggattaaagttttgggattcatgttgcagagcttgcta

SEQ ID NO: 7681 - DNA, 55 bp, Artificial Sequence
  Synthetic polynucleotide
ttactttttaaaactgttcttagtgttcttaggctggagctattggccagaaact

SEQ ID NO: 7682 - DNA, 55 bp, Artificial Sequence
  Synthetic polynucleotide
ccatcatgtacagttgctggcatgagttttaggtaagtgctttattaggatctct

SEQ ID NO: 7683 - DNA, 55 bp, Artificial Sequence
  Synthetic polynucleotide
aggaggagggtgagggggaagaggagggagggggaagaggaggaaggggaggggg

SEQ ID NO: 7684 - DNA, 55 bp, Artificial Sequence
  Synthetic polynucleotide
ccggggcgtgtcaacgcggcgctcggcgctcggcctacgccttctcgcaccagcg

SEQ ID NO: 7685 - DNA, 55 bp, Artificial Sequence
  Synthetic polynucleotide
ctgaagtattcattatagtcaagggcataagggcatatcctacaacaaacttgtc

SEQ ID NO: 7686 - DNA, 55 bp, Artificial Sequence
  Synthetic polynucleotide
ttgcatattttaaaagtggaaataggaaataggtggtgatgggcagacaacaggt

SEQ ID NO: 7687 - DNA, 55 bp, Artificial Sequence
  Synthetic polynucleotide
ttgggctcaggcccatgcaggctgggtgggaggcagcacgtagtccggtgcggga

SEQ ID NO: 7688 - DNA, 55 bp, Artificial Sequence
  Synthetic polynucleotide
cctgacgacaccgccgggccgggctgggctgggctgagagcgagggtttggcaaa

SEQ ID NO: 7689 - DNA, 55 bp, Artificial Sequence
  Synthetic polynucleotide
ttcctggacaaaaataccaatctattgttgtgggctctgggaatcctgctgccac

SEQ ID NO: 7690 - DNA, 55 bp, Artificial Sequence
  Synthetic polynucleotide
tctcatagtagtgctgctgcgtgctgcgtgcggatccagcgccccacgaggtggt

SEQ ID NO: 7691 - DNA, 55 bp, Artificial Sequence
  Synthetic polynucleotide
aaccaggttgctgagtgttacaacgaaaaaaggcagactgctcatctccccaggc

SEQ ID NO: 7692 - DNA, 55 bp, Artificial Sequence
  Synthetic polynucleotide
cgatggcggcggcggcggcggcggcagcggcggcggcggcagcagcagcgggggc

SEQ ID NO: 7693 - DNA, 55 bp, Artificial Sequence
  Synthetic polynucleotide
cgccccacgcactctgcggcaagtcctctgcggcaagtcctcggcccggaagacc

SEQ ID NO: 7694 - DNA, 55 bp, Artificial Sequence
  Synthetic polynucleotide
ggatcgcggagcaggacgcccgcggcgagcaggacgcccgcggcgcgcagggccg

SEQ ID NO: 7695 - DNA, 55 bp, Artificial Sequence
  Synthetic polynucleotide
caccggggtcggaggcgccgcctgggttggaggcgccgcctgggttggggtctgg

SEQ ID NO: 7696 - DNA, 55 bp, Artificial Sequence
  Synthetic polynucleotide
cctgctggcagcgctttatgcggatctatctggatgatgggccagaagcgggtca

SEQ ID NO: 7697 - DNA, 55 bp, Artificial Sequence
  Synthetic polynucleotide
ttctgtgaactacttacgaactgctgggttgggttgtgtcaaatatataagttca

SEQ ID NO: 7698 - DNA, 55 bp, Artificial Sequence
  Synthetic polynucleotide
tgctgctttactcactgtgcatgatgatgttggaggcttggaactctggatcctc

SEQ ID NO: 7699 - DNA, 55 bp, Artificial Sequence
  Synthetic polynucleotide
cctacagcgtcactgtcgatggctgcacgatggctgcacggtgagtgcccagaat

SEQ ID NO: 7700 - DNA, 55 bp, Artificial Sequence
  Synthetic polynucleotide
agcggcggcggcgggggcggcgggggcggcgggggcaccgggtgcccgcagcagc

SEQ ID NO: 7701 - DNA, 55 bp, Artificial Sequence
  Synthetic polynucleotide
acctccggatggttttggtggaggaagtggaggaagtgataattaatatgaggca

SEQ ID NO: 7702 - DNA, 55 bp, Artificial Sequence
  Synthetic polynucleotide
gatacctgtatttacaaccctttgtttgtttggatcagatcttcagtatacaaat

SEQ ID NO: 7703 - DNA, 55 bp, Artificial Sequence
  Synthetic polynucleotide
gggctccgggcagtgctggcggcgtcctggcggcgtcctggctgccctgctggac

SEQ ID NO: 7704 - DNA, 55 bp, Artificial Sequence
  Synthetic polynucleotide
ctcctcatcagaaatcttgaactccactccaggtcttcagtgtagcgctttctct

SEQ ID NO: 7705 - DNA, 55 bp, Artificial Sequence
  Synthetic polynucleotide
caagtttgtggcccgcaactacctggaacctggtaaaagagtgtgtgcagcctgc

SEQ ID NO: 7706 - DNA, 55 bp, Artificial Sequence
  Synthetic polynucleotide
gcccaacatggagccagatgtgaaggagggaggaaactgagggcaagagaaatga

SEQ ID NO: 7707 - DNA, 55 bp, Artificial Sequence
  Synthetic polynucleotide
acgagatgtttcggatttcattccattccacgggaaggagatcttgggggtcagt

SEQ ID NO: 7708 - DNA, 55 bp, Artificial Sequence
  Synthetic polynucleotide
ctccgaggcggcctggcgctccatgcggagcggagcgcggcctccacgctctggc

SEQ ID NO: 7709 - DNA, 55 bp, Artificial Sequence
  Synthetic polynucleotide
tggcccccacaaggtcagctggtagcgtagcggctgttctgctcgtagaaatcgg

SEQ ID NO: 7710 - DNA, 55 bp, Artificial Sequence
  Synthetic polynucleotide
cccacagcatcaccaccgccggagggtccagggtccagtgctcactttccagagt

SEQ ID NO: 7711 - DNA, 55 bp, Artificial Sequence
  Synthetic polynucleotide
tttttttttttaggcgtttcatcaaacggcgggtatatgtgtctttaccaaatga

SEQ ID NO: 7712 - DNA, 55 bp, Artificial Sequence
  Synthetic polynucleotide
tcgaggccgaggaggaggaggaggaggtggtggaaggggaagaaggcggaatggt

SEQ ID NO: 7713 - DNA, 55 bp, Artificial Sequence
  Synthetic polynucleotide
ccctgcgtcccaagaccgggtctcaagaccgggtctcaagaccaggtgagtgggg

SEQ ID NO: 7714 - DNA, 55 bp, Artificial Sequence
  Synthetic polynucleotide
ttgcagtgtgggcaactgcagcccggacggaggcagtgtggcccaaaactgaacc

SEQ ID NO: 7715 - DNA, 55 bp, Artificial Sequence
  Synthetic polynucleotide
tcaccccacacaggtagacggtggcggtggcggtgccggcactgtcagggacctg

SEQ ID NO: 7716 - DNA, 55 bp, Artificial Sequence
  Synthetic polynucleotide
ggttcactctgaacgatggtggcaatcgaacggagctggcaatcgaacgactctc

SEQ ID NO: 7717 - DNA, 55 bp, Artificial Sequence
  Synthetic polynucleotide
ggctcgatacgtcttctccaacttcatccacggctgtcccgaagaggtccaggcg

SEQ ID NO: 7718 - DNA, 55 bp, Artificial Sequence
  Synthetic polynucleotide
ccctggtgctcctggtgctcctggtgctcctggtccccctggccccgttggccct

SEQ ID NO: 7719 - DNA, 55 bp, Artificial Sequence
  Synthetic polynucleotide
gaccaccccgaggggaacgaggggaacgaggggaacggccctcggccgtacgggg

SEQ ID NO: 7720 - DNA, 55 bp, Artificial Sequence
  Synthetic polynucleotide
cagaattcgggaaatgtcgcacggccggccgggccccgctgtgagctagctctac

SEQ ID NO: 7721 - DNA, 55 bp, Artificial Sequence
  Synthetic polynucleotide
acccaactgggatggaaaggagatagatacgggattccccagggtgagcacaaca

SEQ ID NO: 7722 - DNA, 55 bp, Artificial Sequence
  Synthetic polynucleotide
gcatcttcatcatggacgaggccacggcttcggcttccattgacatggccacggt

SEQ ID NO: 7723 - DNA, 55 bp, Artificial Sequence
  Synthetic polynucleotide
ggaggcagcctcctcacgactggaagctcatggaagctcaaggcgtgagtttaca

SEQ ID NO: 7724 - DNA, 55 bp, Artificial Sequence
  Synthetic polynucleotide
gctgcagcagaaactgttcatctgtctgtccggtaggtggggtgggggtgggggt

SEQ ID NO: 7725 - DNA, 55 bp, Artificial Sequence
  Synthetic polynucleotide
ccgtcgcccccgccgccgccgtggccgccgtggccgccgtgccctcgagccccgc

SEQ ID NO: 7726 - DNA, 55 bp, Artificial Sequence
  Synthetic polynucleotide
cgccaggcaggcggagcaccccaagccaggcggagcaccccaagccctcggcctg

SEQ ID NO: 7727 - DNA, 55 bp, Artificial Sequence
  Synthetic polynucleotide
attacctatgagcacagtagaactaagtaagggtgggtggtgtagctaaagaact

SEQ ID NO: 7728 - DNA, 55 bp, Artificial Sequence
  Synthetic polynucleotide
aaatgttctgccatttggtcagaagacggacggttgcatttacccagctaccatt

SEQ ID NO: 7729 - DNA, 55 bp, Artificial Sequence
  Synthetic polynucleotide
gcgggtgggggtgcggcggaggcgggggtgcggcggaggcgggggtgcggccggc

SEQ ID NO: 7730 - DNA, 55 bp, Artificial Sequence
  Synthetic polynucleotide
gggacgggcgtaccgaggtgagcagaggcaaggcagcgagaggcccgcgctgagg

SEQ ID NO: 7731 - DNA, 55 bp, Artificial Sequence
  Synthetic polynucleotide
gcggcggggcgtgctgcgggacggcggcgagggatacaccttcacgctcacggtg

SEQ ID NO: 7732 - DNA, 55 bp, Artificial Sequence
  Synthetic polynucleotide
aaattctgggcaggtattacgagacgagactggctccatcagacccagggcaatc

SEQ ID NO: 7733 - DNA, 55 bp, Artificial Sequence
  Synthetic polynucleotide
agtaaccaggtggacagccacacagcacacaggtaaccgccctcggtattggaac

SEQ ID NO: 7734 - DNA, 55 bp, Artificial Sequence
  Synthetic polynucleotide
cggcggcgcgtgcggcggctgcggcggctgcggcggcttacggcccgcgaggcgg

SEQ ID NO: 7735 - DNA, 55 bp, Artificial Sequence
  Synthetic polynucleotide
tccccatcgtcacgccctcaggagaggtggtggtggtggccagcctcaacatcag

SEQ ID NO: 7736 - DNA, 55 bp, Artificial Sequence
  Synthetic polynucleotide
ggtccctgtccggagaaggggggaagaagtcggcgagatcttcactgtggctgta

SEQ ID NO: 7737 - DNA, 55 bp, Artificial Sequence
  Synthetic polynucleotide
gctcagcccatccagctggctggaggaaggtggaggggtgcgaggcatcggagcc

SEQ ID NO: 7738 - DNA, 55 bp, Artificial Sequence
  Synthetic polynucleotide
cctccactttcaataatggctaaacaataatggctaaagtgtttgtctggctccg

SEQ ID NO: 7739 - DNA, 55 bp, Artificial Sequence
  Synthetic polynucleotide
cggcccgcccgctcgtagatggtggcggccaggtctgtgtacatatatccaggaa

SEQ ID NO: 7740 - DNA, 55 bp, Artificial Sequence
  Synthetic polynucleotide
ggctggcggatgcgctgcaggaactgctgcgggcccagcatgaggaccaggtgga

SEQ ID NO: 7741 - DNA, 55 bp, Artificial Sequence
  Synthetic polynucleotide
agagccacggccaggtcggccaggcaggccaggcacaagtggccaatgaagacgt

SEQ ID NO: 7742 - DNA, 55 bp, Artificial Sequence
  Synthetic polynucleotide
ttgcggtaccaaggttggctgtaccaaggttggctgtaccaacatcgcctatcca

SEQ ID NO: 7743 - DNA, 55 bp, Artificial Sequence
  Synthetic polynucleotide
gcatcacactgcaggtcacctggtgagtcctggtgccagctgcccccctgtcggt

SEQ ID NO: 7744 - DNA, 55 bp, Artificial Sequence
  Synthetic polynucleotide
ggcttgctaatctcccagaggaagttatagaggaagttattcaaaagggacatag

SEQ ID NO: 7745 - DNA, 55 bp, Artificial Sequence
  Synthetic polynucleotide
gctttggctgtctcccagatgtggtggttgtggtggtgctgaactccaagaggac

SEQ ID NO: 7746 - DNA, 55 bp, Artificial Sequence
  Synthetic polynucleotide
taaagtaagtgctggatattcgggatattcgggtagtctgctttctgggtgacta

SEQ ID NO: 7747 - DNA, 55 bp, Artificial Sequence
  Synthetic polynucleotide
cttgatgatgctgatgctttgctgatgctttgggaagtatgttaatttcatggta

SEQ ID NO: 7748 - DNA, 55 bp, Artificial Sequence
  Synthetic polynucleotide
aggcagcgagaggcccgcgctgaggcggcgcggcgcagcgcaaaggggcggacgc

SEQ ID NO: 7749 - DNA, 55 bp, Artificial Sequence
  Synthetic polynucleotide
cagcaatcttgccagtgtggaagaacagtgtggaagaactaaaggtacagtcact

SEQ ID NO: 7750 - DNA, 55 bp, Artificial Sequence
  Synthetic polynucleotide
tcgtgtggatgctgttgtctttctgtctttcggtgaatgttctgaccttggttaa

SEQ ID NO: 7751 - DNA, 55 bp, Artificial Sequence
  Synthetic polynucleotide
gccctggagcccagcagggaagctggtgcagggaagctggtgcagagaagctgcc

SEQ ID NO: 7752 - DNA, 55 bp, Artificial Sequence
  Synthetic polynucleotide
cgtcttccccacacactccctggaagtccctggaagcaaagccagcgccacgttc

SEQ ID NO: 7753 - DNA, 55 bp, Artificial Sequence
  Synthetic polynucleotide
tggaggagggcacggggctgcggctgctgggggctgcggctgctggaggctgccg

SEQ ID NO: 7754 - DNA, 55 bp, Artificial Sequence
  Synthetic polynucleotide
tcgtgtcctccaccgcctcttctcttggcctggcccgactggctctggtttcctt

SEQ ID NO: 7755 - DNA, 55 bp, Artificial Sequence
  Synthetic polynucleotide
ctccggggccgaggacctgcagcgggtgggtggcctcctcccgcctccacaccac

SEQ ID NO: 7756 - DNA, 55 bp, Artificial Sequence
  Synthetic polynucleotide
tccccgcaggccccggacggtgacggcggacggtgacggtgaaggtggaactgag

SEQ ID NO: 7757 - DNA, 55 bp, Artificial Sequence
  Synthetic polynucleotide
agctcctcagccaggtccacgggcagacgacggccccaggcatcgcgcacgtcca

SEQ ID NO: 7758 - DNA, 55 bp, Artificial Sequence
  Synthetic polynucleotide
tgtgtgtggatgctcgtggtgatctgctcgtggtgctctcatcgtggctgacagt

SEQ ID NO: 7759 - DNA, 55 bp, Artificial Sequence
  Synthetic polynucleotide
agggccctgggcttcgaacccggctgctgatggctgctgatcacaggcctgttcg

SEQ ID NO: 7760 - DNA, 55 bp, Artificial Sequence
  Synthetic polynucleotide
gggaagtaaagatgagcactttatagcgcagggactatagcgcagggactcaggc

SEQ ID NO: 7761 - DNA, 55 bp, Artificial Sequence
  Synthetic polynucleotide
ctcacacagtagaccgagttcctatggatggggaaggtgcctcatctgtggggcc

SEQ ID NO: 7762 - DNA, 55 bp, Artificial Sequence
  Synthetic polynucleotide
cctggaaggaccatgtggctgcatgggacggggacgtgattttcagtaaaggtga

SEQ ID NO: 7763 - DNA, 55 bp, Artificial Sequence
  Synthetic polynucleotide
ccaggggaggtgtcggccttggggccgggccgggccgggcgggggcagggccgag

SEQ ID NO: 7764 - DNA, 55 bp, Artificial Sequence
  Synthetic polynucleotide
gatgaccggcacactctgtgcctgcgtgcgtggaggccaggcctggagtggaagg

SEQ ID NO: 7765 - DNA, 55 bp, Artificial Sequence
  Synthetic polynucleotide
tgggcaatggcagcaagctgggcggggggggggtgcagccaggatgacagcagat

SEQ ID NO: 7766 - DNA, 55 bp, Artificial Sequence
  Synthetic polynucleotide
gccacggagatgctctctgtgtagtggtagtggttccggcctttctcatacagga

SEQ ID NO: 7767 - DNA, 55 bp, Artificial Sequence
  Synthetic polynucleotide
cccacagctgggggatgcaggtggagctgttggatgcaggtggagctgttgcact

SEQ ID NO: 7768 - DNA, 55 bp, Artificial Sequence
  Synthetic polynucleotide
agctcggcggtgtttttatcaacggcaggcaggccgctgcccaaccacatccgcc

SEQ ID NO: 7769 - DNA, 55 bp, Artificial Sequence
  Synthetic polynucleotide
catcacccgcggggagacggtgtggggagacggtgtccaccccactgagcaggga

SEQ ID NO: 7770 - DNA, 55 bp, Artificial Sequence
  Synthetic polynucleotide
gaggaggagcccccccgaggagccaccccgaggagccacctgacttctgctgtcc

SEQ ID NO: 7771 - DNA, 55 bp, Artificial Sequence
  Synthetic polynucleotide
ggggcccaggatcagggccagctggccagctggccatctgttcccggctgctccg

SEQ ID NO: 7772 - DNA, 55 bp, Artificial Sequence
  Synthetic polynucleotide
taagaggtccatgctcttctgcagagggaggggtttttggtgccttgataaattg

SEQ ID NO: 7773 - DNA, 55 bp, Artificial Sequence
  Synthetic polynucleotide
ccgcaagccgttgaggtagaaagggaactagggaactgggcatactcgatgggct

SEQ ID NO: 7774 - DNA, 55 bp, Artificial Sequence
  Synthetic polynucleotide
ccttccggatgtagatcttccaggtggaggaggagtcggggttctcggcagcata

SEQ ID NO: 7775 - DNA, 55 bp, Artificial Sequence
  Synthetic polynucleotide
tcccaggacgagtttcgctgccacttccgatgggaagtgcatctctcggcagttc

SEQ ID NO: 7776 - DNA, 55 bp, Artificial Sequence
  Synthetic polynucleotide
gtatttgtttctaaggtatccctggatccctggatccctggggaaatgtggagat

SEQ ID NO: 7777 - DNA, 55 bp, Artificial Sequence
  Synthetic polynucleotide
atgatgctccagacggctaggtgctccagacggctaggtgagagtcaaatcctcg

SEQ ID NO: 7778 - DNA, 55 bp, Artificial Sequence
  Synthetic polynucleotide
aacagcagcaggatgaagaggatgatgaagaggatgatgaagaggatgatggccc

SEQ ID NO: 7779 - DNA, 55 bp, Artificial Sequence
  Synthetic polynucleotide
ggttgtagtgtgtggagagaaactggtgggtggctggaggcacagatggtggccg

SEQ ID NO: 7780 - DNA, 55 bp, Artificial Sequence
  Synthetic polynucleotide
cattgacctgcacaccgactcgctggagcttggagcttctgcagctgcagcaggt

SEQ ID NO: 7781 - DNA, 55 bp, Artificial Sequence
  Synthetic polynucleotide
ccctggctggtccggcaggtgtcgtccggcaggtgtcgtccgccgcgaacgggtg

SEQ ID NO: 7782 - DNA, 55 bp, Artificial Sequence
  Synthetic polynucleotide
tctgattgtggatctctgctgctggtggaaagggtaagaaaggacactggacaaa

SEQ ID NO: 7783 - DNA, 55 bp, Artificial Sequence
  Synthetic polynucleotide
ctttgccacagcccgggaaggggcaggggaaggggcaggggaagggtttctcgcc

SEQ ID NO: 7784 - DNA, 55 bp, Artificial Sequence
  Synthetic polynucleotide
tgctctcactggcccagcatacaggcctacaggccaccgccgagaccagggccgc

SEQ ID NO: 7785 - DNA, 55 bp, Artificial Sequence
  Synthetic polynucleotide
cagatgttctcaatgaacttacgcttggcttggtatgttatcgttggtacagacc

SEQ ID NO: 7786 - DNA, 55 bp, Artificial Sequence
  Synthetic polynucleotide
gctggagaactctgcacgctctgcaatcaatggagaggtactgtttctgacggaa

SEQ ID NO: 7787 - DNA, 55 bp, Artificial Sequence
  Synthetic polynucleotide
acgggcgcggcggcgcggtggcgcgggaggcggcgcggtggcgcgggaggctgcg

SEQ ID NO: 7788 - DNA, 55 bp, Artificial Sequence
  Synthetic polynucleotide
gggcctcgggcggcggcggggagccccgggcggcggcggggagcccaggaggcgc

SEQ ID NO: 7789 - DNA, 55 bp, Artificial Sequence
  Synthetic polynucleotide
ggtgccgcgcgacgacaagaagctggacgctggacccggactcctacaacatgtt

SEQ ID NO: 7790 - DNA, 55 bp, Artificial Sequence
  Synthetic polynucleotide
ggcgcagcagcagcggcggcgcagcagcagcggcggcggccgcggcagcggcggc

SEQ ID NO: 7791 - DNA, 55 bp, Artificial Sequence
  Synthetic polynucleotide
ctcgtcagatttgtccttgcagtcggggcggggccaccatcacagcgccagctgg

SEQ ID NO: 7792 - DNA, 55 bp, Artificial Sequence
  Synthetic polynucleotide
tacacgactgaggtgttgaatggaattgaatggaaaagattttggcactctagga

SEQ ID NO: 7793 - DNA, 55 bp, Artificial Sequence
  Synthetic polynucleotide
gcggccgcggcggctggactcacggggtggtggtggtggtggtgcggatgcgcgt

SEQ ID NO: 7794 - DNA, 55 bp, Artificial Sequence
  Synthetic polynucleotide
atgaatggcgcacttctaaactcctcccccaggcaggagccgggggacgccaggg

SEQ ID NO: 7795 - DNA, 55 bp, Artificial Sequence
  Synthetic polynucleotide
tccaccacagggagccttcgatgcggaatgcggaccttctgggttttgatctcct

SEQ ID NO: 7796 - DNA, 55 bp, Artificial Sequence
  Synthetic polynucleotide
gtggaggaagtgataattaatatgaggatgaggcacagcgtgatgacaactccag

SEQ ID NO: 7797 - DNA, 55 bp, Artificial Sequence
  Synthetic polynucleotide
gggtcttgggggggccgggattggatggattggatgggttccccgggttgttggg

SEQ ID NO: 7798 - DNA, 55 bp, Artificial Sequence
  Synthetic polynucleotide
cgtgttgacgataccggagccaatggtatccggtggcatacacaggctgctgcac

SEQ ID NO: 7799 - DNA, 55 bp, Artificial Sequence
  Synthetic polynucleotide
ttgctaagacagcacacaaaaatggaaaaatggatcaaccttaaaggaaactgct

SEQ ID NO: 7800 - DNA, 55 bp, Artificial Sequence
  Synthetic polynucleotide
ccacttgtgtgtctagatctcctcagtgggtggccgcctctactgggttgactcc

SEQ ID NO: 7801 - DNA, 55 bp, Artificial Sequence
  Synthetic polynucleotide
cgcctcctctcctcgcaggagtctgatgactggaaggtgctgaagctggttctgg

SEQ ID NO: 7802 - DNA, 55 bp, Artificial Sequence
  Synthetic polynucleotide
aagcaagggaaacgggtcgccatcgacaacgggtcgccatcgacaacacaaaccc

SEQ ID NO: 7803 - DNA, 55 bp, Artificial Sequence
  Synthetic polynucleotide
gtcaaatgcctcgaactcccgcaccagaccaggacggtgacacgggggccggcag

SEQ ID NO: 7804 - DNA, 55 bp, Artificial Sequence
  Synthetic polynucleotide
gggcccgcagcaaacttcggggggcggcggcggcggcaactccaccgcggcggcg

SEQ ID NO: 7805 - DNA, 55 bp, Artificial Sequence
  Synthetic polynucleotide
tggtgctgcagcgtgggcacgggcagtgagtggctcgttgcccccggtctcccgc

SEQ ID NO: 7806 - DNA, 55 bp, Artificial Sequence
  Synthetic polynucleotide
ccgcctcgtcgttgtaaatgggggtgtaaatgggggtgtccgcgaacttggggaa

SEQ ID NO: 7807 - DNA, 55 bp, Artificial Sequence
  Synthetic polynucleotide
tcttaaaacgctcatagagtaacgagtaactggttgtgcagtaaaagcaactggt

SEQ ID NO: 7808 - DNA, 55 bp, Artificial Sequence
  Synthetic polynucleotide
gaggaaggcttcacggctcagacggcttcacggctcagacgcaggcccgggaata

SEQ ID NO: 7809 - DNA, 55 bp, Artificial Sequence
  Synthetic polynucleotide
ggagaaacccttagacgagcagctgcatgcaggtcccctgcaacagatggatggg

SEQ ID NO: 7810 - DNA, 55 bp, Artificial Sequence
  Synthetic polynucleotide
cccaggtcatggtgatcaaacgccccgccccggcaggaagcgaaaagctgaggcc

SEQ ID NO: 7811 - DNA, 55 bp, Artificial Sequence
  Synthetic polynucleotide
tgcctccacagtggtcggaggagacgtaggaggagacctagagtttgtctgcaag

SEQ ID NO: 7812 - DNA, 55 bp, Artificial Sequence
  Synthetic polynucleotide
gggccccgtgagcaccaggcactggggctgggggctgaggagggaagggaaaagg

SEQ ID NO: 7813 - DNA, 55 bp, Artificial Sequence
  Synthetic polynucleotide
cctccccgcggagctggcgtttctgcgcagcggcgtttctgcgcagccggacctc

SEQ ID NO: 7814 - DNA, 55 bp, Artificial Sequence
  Synthetic polynucleotide
tacctaaagactggtagagctctgtcattttggtagagctctgtcattttgggat

SEQ ID NO: 7815 - DNA, 55 bp, Artificial Sequence
  Synthetic polynucleotide
ctgacctgagatggtctccttggtagcccttggtgaagaactgcatggccgaggc

SEQ ID NO: 7816 - DNA, 55 bp, Artificial Sequence
  Synthetic polynucleotide
accagcccacccacgtcaacaacggcaactaggcaactacacgctgctggctgcc

SEQ ID NO: 7817 - DNA, 55 bp, Artificial Sequence
  Synthetic polynucleotide
ttatcagctgggctaggtccaggtgcgtgctgggagcccacggtatcgtgaactc

SEQ ID NO: 7818 - DNA, 55 bp, Artificial Sequence
  Synthetic polynucleotide
cagcggctcctgtggctcctgcggctcctgcggctgctgttcccccgggtcctgt

SEQ ID NO: 7819 - DNA, 55 bp, Artificial Sequence
  Synthetic polynucleotide
tgcggagattctcttcctctgtgcgcccgccggtctctcccaggacaggcacaaa

SEQ ID NO: 7820 - DNA, 55 bp, Artificial Sequence
  Synthetic polynucleotide
gcggatgcgggtgggggtgcggcggaggtgggggtgcggcggaggcgggggtgcg

SEQ ID NO: 7821 - DNA, 55 bp, Artificial Sequence
  Synthetic polynucleotide
tgcacggaatgcagccaccaagagccggccgggccaaggacagggatgacttcaa

SEQ ID NO: 7822 - DNA, 55 bp, Artificial Sequence
  Synthetic polynucleotide
gaggaacaccacgaggccggcgatggccgatggccgagggccaggctgtgccggc

SEQ ID NO: 7823 - DNA, 55 bp, Artificial Sequence
  Synthetic polynucleotide
tgctcacggccatggggctgctggcgctgctggcgctgctgggtgagccggggcc

SEQ ID NO: 7824 - DNA, 55 bp, Artificial Sequence
  Synthetic polynucleotide
ggggcccccgcccaggccctgcagggccccaggccctgcagggccccaggccctg

SEQ ID NO: 7825 - DNA, 55 bp, Artificial Sequence
  Synthetic polynucleotide
ttgaaggtgcccacggagcggaaggtgtaaaggtgtaagagatggtaggaccccc

SEQ ID NO: 7826 - DNA, 55 bp, Artificial Sequence
  Synthetic polynucleotide
ctttccgtcaagatttaaattccaaattccaggttgtcatcaatggccgagagtt

SEQ ID NO: 7827 - DNA, 55 bp, Artificial Sequence
  Synthetic polynucleotide
ccctgaacagaagatagaaagggagaaagaaggagaggcggatggctaacaatgc

SEQ ID NO: 7828 - DNA, 55 bp, Artificial Sequence
  Synthetic polynucleotide
ttcgtggttgtcatcctctccatcgtgggtgggtgggtatacaagtcagctggac

SEQ ID NO: 7829 - DNA, 55 bp, Artificial Sequence
  Synthetic polynucleotide
ttcacttgataaaggttctgctagtgataaaggttctgctagaacatcaggcaaa

SEQ ID NO: 7830 - DNA, 55 bp, Artificial Sequence
  Synthetic polynucleotide
cccgtcgcccgggatacctgacaggggagggggttgcaagtgtcgctgctcttct

SEQ ID NO: 7831 - DNA, 55 bp, Artificial Sequence
  Synthetic polynucleotide
agtgcagcgaggtcatgagcaacatggtcatggtgtctgagaacatgctgtgtgc

SEQ ID NO: 7832 - DNA, 55 bp, Artificial Sequence
  Synthetic polynucleotide
tgcaggtgtccgtgggcctgtacacgtccgtgggcctgtacacgtccctgtgcca

SEQ ID NO: 7833 - DNA, 55 bp, Artificial Sequence
  Synthetic polynucleotide
actgatttctaaactgtcaggaaaactgtcaggaaaataagagagaacaattacc

SEQ ID NO: 7834 - DNA, 55 bp, Artificial Sequence
  Synthetic polynucleotide
cggctcctgtttgatgaaggagtgaggcggcggagtgaggcggcggcggcggggg

SEQ ID NO: 7835 - DNA, 55 bp, Artificial Sequence
  Synthetic polynucleotide
tacctggaggctgcagaacattgggaacattggtgatgacatggaccacgccatt

SEQ ID NO: 7836 - DNA, 55 bp, Artificial Sequence
  Synthetic polynucleotide
agttgacataccgggataccttggtatatatggtatatattccatatttgccttt

SEQ ID NO: 7837 - DNA, 55 bp, Artificial Sequence
  Synthetic polynucleotide
ccgcagcttcccgggccgcggcagcggcggcggcggcggccgccagggacccggt

SEQ ID NO: 7838 - DNA, 55 bp, Artificial Sequence
  Synthetic polynucleotide
tgatgaaggccaaaaatggctgggtgtagtaggagcagtgtcctcacaataaaga

SEQ ID NO: 7839 - DNA, 55 bp, Artificial Sequence
  Synthetic polynucleotide
cacaactctgcagaggcacttaactaactctggtagggacttcagtagctgtctg

SEQ ID NO: 7840 - DNA, 55 bp, Artificial Sequence
  Synthetic polynucleotide
acctccctcctgctgagttctaaggaaggaaggaaggaagtcattttccattctg

SEQ ID NO: 7841 - DNA, 55 bp, Artificial Sequence
  Synthetic polynucleotide
ttgtgagctgcactgcttgtggacaacaacaggtcaatcattttcaaaaagattc

SEQ ID NO: 7842 - DNA, 55 bp, Artificial Sequence
  Synthetic polynucleotide
tggtgctgctggacggactggtccccccccaggaccctctgtaagtaaatcactg

SEQ ID NO: 7843 - DNA, 55 bp, Artificial Sequence
  Synthetic polynucleotide
gtcatggggcccttggtgcgtcatccatcctggtgtgttcactgagtatttgctg

SEQ ID NO: 7844 - DNA, 55 bp, Artificial Sequence
  Synthetic polynucleotide
gcaggcctctaatgaactttccaggatagcaggatagcaaatagcctcacagggt

SEQ ID NO: 7845 - DNA, 55 bp, Artificial Sequence
  Synthetic polynucleotide
aagtcatctgggatgtcatctgtggatctgtggcccactggccattttcaaagtc

SEQ ID NO: 7846 - DNA, 55 bp, Artificial Sequence
  Synthetic polynucleotide
tttgcagataccctaacttagacttctttcgggtggaaaaaatctattgacagca

SEQ ID NO: 7847 - DNA, 55 bp, Artificial Sequence
  Synthetic polynucleotide
aggcagctgcatgaagcccacagggactcagggactttggtccagcatctcagca

SEQ ID NO: 7848 - DNA, 55 bp, Artificial Sequence
  Synthetic polynucleotide
ttatcctctgtgacaatggcctggggctgacggctgactggacaggggtttgctc

SEQ ID NO: 7849 - DNA, 55 bp, Artificial Sequence
  Synthetic polynucleotide
gcttgacaatacactcgcctgtgaagatgatggccacaaagagcaggttgatctt

SEQ ID NO: 7850 - DNA, 55 bp, Artificial Sequence
  Synthetic polynucleotide
ctgcagctggccagcagcagggcaacagccgggcaacagccagagggagcgtgcc

SEQ ID NO: 7851 - DNA, 55 bp, Artificial Sequence
  Synthetic polynucleotide
agcagctccacaaccacctccagcctggcctgggagataggccttgcttgctgcc

SEQ ID NO: 7852 - DNA, 55 bp, Artificial Sequence
  Synthetic polynucleotide
gcggtggacgatggaggggccggactggaggggccggactcgtcatactcctgct

SEQ ID NO: 7853 - DNA, 55 bp, Artificial Sequence
  Synthetic polynucleotide
ttgcggtggacgatggaggggccggactggaggggccggactcgtcatactcctg

SEQ ID NO: 7854 - DNA, 55 bp, Artificial Sequence
  Synthetic polynucleotide
agcccaggagcttgccctgggactccagcctgggactccaggctggagctccggt

SEQ ID NO: 7855 - DNA, 55 bp, Artificial Sequence
  Synthetic polynucleotide
atagttgtcaatcagaaggggtaatccagaaggggtaatccaatcaggttccctt

SEQ ID NO: 7856 - DNA, 55 bp, Artificial Sequence
  Synthetic polynucleotide
attcagtacaattaggtgggcttagatttgtgggcttagatttctactgactact

SEQ ID NO: 7857 - DNA, 55 bp, Artificial Sequence
  Synthetic polynucleotide
gcgtctctgaagactgctcagggctactcagggctatcctctcagagtgacattt

SEQ ID NO: 7858 - DNA, 55 bp, Artificial Sequence
  Synthetic polynucleotide
cttgtgtgtctgccgtggggcccagtcccggggcccagtcccggagccgctggaa

SEQ ID NO: 7859 - DNA, 55 bp, Artificial Sequence
  Synthetic polynucleotide
tgaggggttggccacacgggccttgacgtacgggccttgacgtgcggccctccgg

SEQ ID NO: 7860 - DNA, 55 bp, Artificial Sequence
  Synthetic polynucleotide
ctgctctccacgtcgccccggggccgccccggggccgccgacccgggctggagag

SEQ ID NO: 7861 - DNA, 55 bp, Artificial Sequence
  Synthetic polynucleotide
cctgacttacctcacggtgggccttcacggtgggcctcgctggagattttattgg

SEQ ID NO: 7862 - DNA, 55 bp, Artificial Sequence
  Synthetic polynucleotide
tctggtgccagacatcatgtgcggggatgcggggatgtctcctgtccagtacacc

SEQ ID NO: 7863 - DNA, 55 bp, Artificial Sequence
  Synthetic polynucleotide
gccgagaagttggcgatggtggcgagccggtggcgagccggtagcggcggcagct

SEQ ID NO: 7864 - DNA, 55 bp, Artificial Sequence
  Synthetic polynucleotide
gcctgttgctgttcatgatggctggcatgatggctggcatgacagtgtccatgta

SEQ ID NO: 7865 - DNA, 55 bp, Artificial Sequence
  Synthetic polynucleotide
tggctgtgccagtgctggctgtgccagagctggctgtgccagagctggtttggaa

SEQ ID NO: 7866 - DNA, 55 bp, Artificial Sequence
  Synthetic polynucleotide
cggctttgctgatgctggctgtgccagtgctggctgtgccagtgctggctgtgcc

SEQ ID NO: 7867 - DNA, 55 bp, Artificial Sequence
  Synthetic polynucleotide
cctgctctccacgtcgccccggggccgccccggggccgccgacccgggctggaga

SEQ ID NO: 7868 - DNA, 55 bp, Artificial Sequence
  Synthetic polynucleotide
gcaccggagctccagcctggagtcccaggctggagtcccagggcaagctcctggg

SEQ ID NO: 7869 - DNA, 55 bp, Artificial Sequence
  Synthetic polynucleotide
ccccctggtgaacctgggcaagctggacctgggcaagctggtccttcagtaagta

SEQ ID NO: 7870 - DNA, 55 bp, Artificial Sequence
  Synthetic polynucleotide
gcggcgcggatgctgcggacgccgggacgccgggacgccacggctacgccgccga

SEQ ID NO: 7871 - DNA, 55 bp, Artificial Sequence
  Synthetic polynucleotide
aggtcttccgggccgaggacttgccgcagagggacttgccgcagagtgcgtgggg

SEQ ID NO: 7872 - DNA, 55 bp, Artificial Sequence
  Synthetic polynucleotide
aggaagcgaaaagctgaggccgaaaagctgaggccgaccctcaggccattcccaa

SEQ ID NO: 7873 - DNA, 55 bp, Artificial Sequence
  Synthetic polynucleotide
gtctggtgccagacatcatgtgcggggatgcggggatgtctcctgtccagtacac

SEQ ID NO: 7874 - DNA, 55 bp, Artificial Sequence
  Synthetic polynucleotide
gcgtcttccagcggctccgggactgggccccgggactgggccccacggcagacac

SEQ ID NO: 7875 - DNA, 55 bp, Artificial Sequence
  Synthetic polynucleotide
cggccgccacaccatggtggacggcaccctcggcaccctcagcacccacaggcct

SEQ ID NO: 7876 - DNA, 55 bp, Artificial Sequence
  Synthetic polynucleotide
gcccggcacccgcgtccgcgccatgggccatggccatctacaagcagtcacagca

SEQ ID NO: 7877 - DNA, 55 bp, Artificial Sequence
  Synthetic polynucleotide
cgcggtgaacctggtactcctgggtctcctgggtcccctgggcctgctggtgcct

SEQ ID NO: 7878 - DNA, 55 bp, Artificial Sequence
  Synthetic polynucleotide
accagcaggcccaggggacccaggagacccaggagtaccaggttcaccgcgagga

SEQ ID NO: 7879 - DNA, 55 bp, Artificial Sequence
  Synthetic polynucleotide
gtcatcgaggtgaagacaaaaggaggatcaaggaggatccaagtacctcatctac

SEQ ID NO: 7880 - DNA, 55 bp, Artificial Sequence
  Synthetic polynucleotide
cggctgcggcaggtgcggctgcagcaggtgcggctgcaggaaggtgagctggcag

SEQ ID NO: 7881 - DNA, 55 bp, Artificial Sequence
  Synthetic polynucleotide
gcgcgtatcattccagttacctccatggcatggcgactacgtccagagcacttcc

SEQ ID NO: 7882 - DNA, 55 bp, Artificial Sequence
  Synthetic polynucleotide
aatgacaattctcacatggtggagagtggaaggtggagagtggaaggtagacagt

SEQ ID NO: 7883 - DNA, 55 bp, Artificial Sequence
  Synthetic polynucleotide
ccttgtgtgtctgccgtggggcccagtcccggggcccagtcccggagccgctgga

SEQ ID NO: 7884 - DNA, 55 bp, Artificial Sequence
  Synthetic polynucleotide
tcgtcagatttgtccttgcagtcggcagtcggggccaccatcacagcgccagctg

SEQ ID NO: 7885 - DNA, 55 bp, Artificial Sequence
  Synthetic polynucleotide
ggatctaccggcttgggccggggcggtttggggcggtttggggcgcagatagccg

SEQ ID NO: 7886 - DNA, 55 bp, Artificial Sequence
  Synthetic polynucleotide
tctcgcggatcgccatggcgatgagcgccacggcgatgagcgccacgtacgagta

SEQ ID NO: 7887 - DNA, 55 bp, Artificial Sequence
  Synthetic polynucleotide
accttgtgtgtctgccgtggggcccagtcccggggcccagtcccggagccgctgg

SEQ ID NO: 7888 - DNA, 55 bp, Artificial Sequence
  Synthetic polynucleotide
cgtggtgcggtggggcaggcggcggtgcggcggtgcggcggccgcgtgcagatgg

SEQ ID NO: 7889 - DNA, 55 bp, Artificial Sequence
  Synthetic polynucleotide
ctagcatgaagacggtgaagacggtgaagacggttttctcggtggggcgggacac

SEQ ID NO: 7890 - DNA, 55 bp, Artificial Sequence
  Synthetic polynucleotide
ctggagtcacccttcccagtgaggcaggcaggggtcgttaggggaggtgatacgc

SEQ ID NO: 7891 - DNA, 55 bp, Artificial Sequence
  Synthetic polynucleotide
cccactcatcagacagtgaggaggaagaagaggaggaagaagaggaggaggaaga

SEQ ID NO: 7892 - DNA, 55 bp, Artificial Sequence
  Synthetic polynucleotide
cgtaagtgataaaagccagggataaaagccagggacagcaggaccgcagccaggt

SEQ ID NO: 7893 - DNA, 55 bp, Artificial Sequence
  Synthetic polynucleotide
aagcggggctgaactttgcagacgaggacgaggacgaggcccaggccttccgggc

SEQ ID NO: 7894 - DNA, 55 bp, Artificial Sequence
  Synthetic polynucleotide
tacgaaggcctgtgggtgctgagggtgccgagggtgccgtccaccatggtgtggc

SEQ ID NO: 7895 - DNA, 55 bp, Artificial Sequence
  Synthetic polynucleotide
gccacgggctgggccgggccgggcagggcagggggctaccaccccgcgccgcaga

SEQ ID NO: 7896 - DNA, 55 bp, Artificial Sequence
  Synthetic polynucleotide
gtccctttggtgacgtgggctgggccgggccgggcccaggaagtgaggcggcgct

SEQ ID NO: 7897 - DNA, 55 bp, Artificial Sequence
  Synthetic polynucleotide
acgcgactcgaggctgtgcgggaaatgtgcgggaaatgtcggagacccatcactg

SEQ ID NO: 7898 - DNA, 55 bp, Artificial Sequence
  Synthetic polynucleotide
ttcagcagcctcaccagtgtgggcttcgtgtgggcttcggcaacgtctctcccaa

SEQ ID NO: 7899 - DNA, 55 bp, Artificial Sequence
  Synthetic polynucleotide
gaggacgctgactgcgctgagggcccgctgagggcccgctgccgtgctcctggct

SEQ ID NO: 7900 - DNA, 55 bp, Artificial Sequence
  Synthetic polynucleotide
aggacgctgactgcgctgagggcccgctgagggcccgctgccgtgctcctggctc

SEQ ID NO: 7901 - DNA, 55 bp, Artificial Sequence
  Synthetic polynucleotide
gccagctttgagtacactatcctggaatcctggaccccagctcccagctcttgcg

SEQ ID NO: 7902 - DNA, 55 bp, Artificial Sequence
  Synthetic polynucleotide
gagccaggagcacggcagcgggccctcagcgggccctcagcgcagtcagcgtcct

SEQ ID NO: 7903 - DNA, 55 bp, Artificial Sequence
  Synthetic polynucleotide
tacgaagaccatcagtgcgaggtcggcatgaggtcggcatgatcgtgggtaaggg

SEQ ID NO: 7904 - DNA, 55 bp, Artificial Sequence
  Synthetic polynucleotide
tgctgcagcggctggcagacggggccagacggggccatcgacctctatgccatgg

SEQ ID NO: 7905 - DNA, 55 bp, Artificial Sequence
  Synthetic polynucleotide
gagtccgctgctgtagtcgtgggcagtcgtgggcagccgccggcacataggaggg

SEQ ID NO: 7906 - DNA, 55 bp, Artificial Sequence
  Synthetic polynucleotide
ggaaaactgcggtatgggcggggccagggcggggccagggtgggggcggggcgtc

SEQ ID NO: 7907 - DNA, 55 bp, Artificial Sequence
  Synthetic polynucleotide
cctttgagatgctgatcctgggccgcttctgggccgcttcatcatcggtgtgtac

SEQ ID NO: 7908 - DNA, 55 bp, Artificial Sequence
  Synthetic polynucleotide
gggcgcgcagggcggcgcgggcctcccgcgcgggcctcccggcgcaggcggcgct

SEQ ID NO: 7909 - DNA, 55 bp, Artificial Sequence
  Synthetic polynucleotide
agggtcagcagggtcagcctggaggcctggaggccatctgggcggcgacgtcagc

SEQ ID NO: 7910 - DNA, 55 bp, Artificial Sequence
  Synthetic polynucleotide
gctctggcacttgcttcaggcccttgcttcaggcccttgtgtctatgtgtataag

SEQ ID NO: 7911 - DNA, 55 bp, Artificial Sequence
  Synthetic polynucleotide
ggagccctggctggtccggcaggtgtcgtccggcaggtgtcgtccgccgcgaacg

SEQ ID NO: 7912 - DNA, 55 bp, Artificial Sequence
  Synthetic polynucleotide
ggacgccccgcccccaccctggccccgccctggccccgcccataccgcagttttc

SEQ ID NO: 7913 - DNA, 55 bp, Artificial Sequence
  Synthetic polynucleotide
catgagcctggacatggggcaaccttctcggggcaaccttctcaggccaacacta

SEQ ID NO: 7914 - DNA, 55 bp, Artificial Sequence
  Synthetic polynucleotide
agagcgccgcctgcgccgggaggcccgcgcgggaggcccgcgccgccctgcgcgc

SEQ ID NO: 7915 - DNA, 55 bp, Artificial Sequence
  Synthetic polynucleotide
gccctgcgtcccaagaccgggtctcaagaccgggtctcaagaccaggtgagtggg

SEQ ID NO: 7916 - DNA, 55 bp, Artificial Sequence
  Synthetic polynucleotide
tagtggccatgcacgtggcctaccggagaccggagacatgagaagaagaggaagt

SEQ ID NO: 7917 - DNA, 55 bp, Artificial Sequence
  Synthetic polynucleotide
tccctttcttcatcagtggggcgctggagtggggcgctggagtccaagggattgt

SEQ ID NO: 7918 - DNA, 55 bp, Artificial Sequence
  Synthetic polynucleotide
tgggtttttaaaaatcgttttagggttttagggtcttactacggagcacatttgc

SEQ ID NO: 7919 - DNA, 55 bp, Artificial Sequence
  Synthetic polynucleotide
atggtccagcagggcagccaggacgccgccaggacgccgccagcactgcccggag

SEQ ID NO: 7920 - DNA, 55 bp, Artificial Sequence
  Synthetic polynucleotide
ttccctttcttcatcagtggggcgctggagtggggcgctggagtccaagggattg

SEQ ID NO: 7921 - DNA, 55 bp, Artificial Sequence
  Synthetic polynucleotide
cggactttgtggcggaactgggggcggaactgggggcggcacaggggctcagtca

SEQ ID NO: 7922 - DNA, 55 bp, Artificial Sequence
  Synthetic polynucleotide
gctgcagcggctggcagacggggccagacggggccatcgacctctatgccatggt

SEQ ID NO: 7923 - DNA, 55 bp, Artificial Sequence
  Synthetic polynucleotide
cctttgtagagagtgttcatctgggaatctgggacttggatgagacaatcattgt

SEQ ID NO: 7924 - DNA, 55 bp, Artificial Sequence
  Synthetic polynucleotide
aggaaaactgcggtatgggcggggccagggcggggccagggtgggggcggggcgt

SEQ ID NO: 7925 - DNA, 55 bp, Artificial Sequence
  Synthetic polynucleotide
ttcacaccgaagctcaaggtggagacaaggtggagacggacatggaatcttcact

SEQ ID NO: 7926 - DNA, 55 bp, Artificial Sequence
  Synthetic polynucleotide
agcgccccctcgcggtgcggtccgggactgcggtccgggactgcgcccctgcgca

SEQ ID NO: 7927 - DNA, 55 bp, Artificial Sequence
  Synthetic polynucleotide
cggaggacgtggtggcctttgcggcctctgcggcctctgtggcccacctctactc

SEQ ID NO: 7928 - DNA, 55 bp, Artificial Sequence
  Synthetic polynucleotide
actttccatgactggatcacagggatcacagggaaaaaccgaccgagctcaggaa

SEQ ID NO: 7929 - DNA, 55 bp, Artificial Sequence
  Synthetic polynucleotide
caccgataggcatgaagggctgggaggcaagggctgggaggcagggctgggcctg

SEQ ID NO: 7930 - DNA, 55 bp, Artificial Sequence
  Synthetic polynucleotide
gggtgtgctggaaaagggtccagatggaaaagggtccagatgatatgttctaatt

SEQ ID NO: 7931 - DNA, 55 bp, Artificial Sequence
  Synthetic polynucleotide
ccgggtcggcggccccggggcgacggccccggggcgacgtggagagcaggctgga

SEQ ID NO: 7932 - DNA, 55 bp, Artificial Sequence
  Synthetic polynucleotide
caggggtgaactcggcggggaggtgctcggcggggaggtgggcggccagggtcac

SEQ ID NO: 7933 - DNA, 55 bp, Artificial Sequence
  Synthetic polynucleotide
ccctcgcggtgcggtccgggactgcggtccgggactgcgcccctgcgcaccgctc

SEQ ID NO: 7934 - DNA, 55 bp, Artificial Sequence
  Synthetic polynucleotide
gggtccgcaggagatgagaaggggaggagaaggggaggagaattcgtggagctgc

SEQ ID NO: 7935 - DNA, 55 bp, Artificial Sequence
  Synthetic polynucleotide
aacaggatctgctgggatgctgggccccgctgggccccacttgaaacggttcctc

SEQ ID NO: 7936 - DNA, 55 bp, Artificial Sequence
  Synthetic polynucleotide
gggcggccgcaaccggggcactgcagctaccggggcactgcagctgccgccgccg

SEQ ID NO: 7937 - DNA, 55 bp, Artificial Sequence
  Synthetic polynucleotide
ttggataggcgatgttggtacagccaaccttggtacagccaaccttggtaccgca

SEQ ID NO: 7938 - DNA, 55 bp, Artificial Sequence
  Synthetic polynucleotide
cgtcgccgcccagatggcctccaggcctccaggctgaccctgctgaccctcctgc

SEQ ID NO: 7939 - DNA, 55 bp, Artificial Sequence
  Synthetic polynucleotide
tgcggatgcgggtgggggtgcggcggaggtgggggtgcggcggaggcgggggtgc

SEQ ID NO: 7940 - DNA, 55 bp, Artificial Sequence
  Synthetic polynucleotide
ccagggagcgcgggggcttctttagcccgggggcttctttagcccggaacccggt

SEQ ID NO: 7941 - DNA, 55 bp, Artificial Sequence
  Synthetic polynucleotide
tgtttccagtagcagctgacagagggttagagggttattcaacagcccgcccaag

SEQ ID NO: 7942 - DNA, 55 bp, Artificial Sequence
  Synthetic polynucleotide
ggaaccagcaggaccgggagcaccaggaccgggagcaccagcagggccagcaggg

SEQ ID NO: 7943 - DNA, 55 bp, Artificial Sequence
  Synthetic polynucleotide
cagccgggaacagatggccagctggccagctggccctgatcctgggccccgtgct

SEQ ID NO: 7944 - DNA, 55 bp, Artificial Sequence
  Synthetic polynucleotide
ggactttgtggcggaactgggggcggaactgggggcggcacaggggctcagtcag

SEQ ID NO: 7945 - DNA, 55 bp, Artificial Sequence
  Synthetic polynucleotide
gtgcggatgcgggtgggggtgcggcggaggtgggggtgcggcggaggcgggggtg

SEQ ID NO: 7946 - DNA, 55 bp, Artificial Sequence
  Synthetic polynucleotide
tgtgctagggatgcttccaaggccattccaaggccattccaagaaggactagaag

SEQ ID NO: 7947 - DNA, 55 bp, Artificial Sequence
  Synthetic polynucleotide
cggatgcgggtgggggtgcggcggaggtgggggtgcggcggaggcgggggtgcgg

SEQ ID NO: 7948 - DNA, 55 bp, Artificial Sequence
  Synthetic polynucleotide
ctggctgttgccctgctgctggccagctgctggccagctgcagcctcagccccac

SEQ ID NO: 7949 - DNA, 55 bp, Artificial Sequence
  Synthetic polynucleotide
ttcctcctggtggttgggatggggctggatggggctggctggggccttcctggcc

SEQ ID NO: 7950 - DNA, 55 bp, Artificial Sequence
  Synthetic polynucleotide
ggtgcggcggaggcgggggtgcggccgaggcgggggtgcggccggcgggcctccc

SEQ ID NO: 7951 - DNA, 55 bp, Artificial Sequence
  Synthetic polynucleotide
cgcaggagatgagaaggggaggagaaggggaggagaattcgtggagctgccggtg

SEQ ID NO: 7952 - DNA, 55 bp, Artificial Sequence
  Synthetic polynucleotide
caattcaccagcaaggatgccttcagagcaaggatgccttcagagtgcatataag

SEQ ID NO: 7953 - DNA, 55 bp, Artificial Sequence
  Synthetic polynucleotide
ttcattgttcgctgaaggggaaggctcgaaggggaaggctcgcaagcgatgtaga

SEQ ID NO: 7954 - DNA, 55 bp, Artificial Sequence
  Synthetic polynucleotide
cgcgagactacgaaggcctgtgggtgctgtgggtgctgagggtgccgtccaccat

SEQ ID NO: 7955 - DNA, 55 bp, Artificial Sequence
  Synthetic polynucleotide
gaaggtggcagcacggctcaggtgccagcacggctcaggtgccagcacccacagc

SEQ ID NO: 7956 - DNA, 55 bp, Artificial Sequence
  Synthetic polynucleotide
ctcaccgggttccgggctaaagaagcccccgggctaaagaagcccccgcgctccc

SEQ ID NO: 7957 - DNA, 55 bp, Artificial Sequence
  Synthetic polynucleotide
ggacagcagaagtcaggtggctcctcggggtggctcctcgggggggctcctcctc

SEQ ID NO: 7958 - DNA, 55 bp, Artificial Sequence
  Synthetic polynucleotide
cccagggagcgcgggggcttctttagcccgggggcttctttagcccggaacccgg

SEQ ID NO: 7959 - DNA, 55 bp, Artificial Sequence
  Synthetic polynucleotide
ggattttgtgcatctggtggaatggggccctggtggaatggggccctcttttttc

SEQ ID NO: 7960 - DNA, 55 bp, Artificial Sequence
  Synthetic polynucleotide
tcctttgagatgctgatcctgggccgcttctgggccgcttcatcatcggtgtgta

SEQ ID NO: 7961 - DNA, 55 bp, Artificial Sequence
  Synthetic polynucleotide
tcttcccgcagcccgggaaggggcatgggaaggggcatgggaagggcttctcgcc

SEQ ID NO: 7962 - DNA, 55 bp, Artificial Sequence
  Synthetic polynucleotide
gcagggagccagcagaccagggccccaccagggccccgggatgcccaggcacacc

SEQ ID NO: 7963 - DNA, 55 bp, Artificial Sequence
  Synthetic polynucleotide
gctgaggtgtttccctttgaggatccagataggatccagattagtcaattcagca

SEQ ID NO: 7964 - DNA, 55 bp, Artificial Sequence
  Synthetic polynucleotide
gtccgcaggagatgagaaggggaggagaaggggaggagaattcgtggagctgccg

SEQ ID NO: 7965 - DNA, 55 bp, Artificial Sequence
  Synthetic polynucleotide
ggtgtgcctgggcatcccggggccctggtggggccctggtctgctggctccctgc

SEQ ID NO: 7966 - DNA, 55 bp, Artificial Sequence
  Synthetic polynucleotide
ggggcccgggggcccgggaggcgaaccccccgggaggcgaacccggcaagggcgg

SEQ ID NO: 7967 - DNA, 55 bp, Artificial Sequence
  Synthetic polynucleotide
gaagcaagggaaacgggtcgccatcgacaacgggtcgccatcgacaacacaaacc

SEQ ID NO: 7968 - DNA, 55 bp, Artificial Sequence
  Synthetic polynucleotide
gcaggtgtccgtgggcctgtacacgtccgtgggcctgtacacgtccctgtgccag

SEQ ID NO: 7969 - DNA, 55 bp, Artificial Sequence
  Synthetic polynucleotide
ccagctccgggaatggaccagccccgggaatggaccagcccctcccccactccct

SEQ ID NO: 7970 - DNA, 55 bp, Artificial Sequence
  Synthetic polynucleotide
tcacgtcgtagcggtgcatgggctgcgcatgggctgcatctgcgctgcgccgtgc

SEQ ID NO: 7971 - DNA, 55 bp, Artificial Sequence
  Synthetic polynucleotide
aagacctccggatggttttggtggaggaagtggaggaagtgataattaatatgag

SEQ ID NO: 7972 - DNA, 55 bp, Artificial Sequence
  Synthetic polynucleotide
ccctgcgcgccgcgggcgtcctgctcgccgcgggcgtcctgctccgcgatccgcg

SEQ ID NO: 7973 - DNA, 55 bp, Artificial Sequence
  Synthetic polynucleotide
ggaagtgcgcgggcggcggccggaagggcgcggccggaagggcctcttcatgcgg

SEQ ID NO: 7974 - DNA, 55 bp, Artificial Sequence
  Synthetic polynucleotide
cttaccagccatatcagtctgtgggactgtgggatctggtacagttttgtaaatt

SEQ ID NO: 7975 - DNA, 55 bp, Artificial Sequence
  Synthetic polynucleotide
cgcaggcggtcggcgggcgcagccggtcggcgggcgcagccggcggctccgagga

SEQ ID NO: 7976 - DNA, 55 bp, Artificial Sequence
  Synthetic polynucleotide
tagagcgccgcctgcgccgggaggcccgcgcgggaggcccgcgccgccctgcgcg

SEQ ID NO: 7977 - DNA, 55 bp, Artificial Sequence
  Synthetic polynucleotide
tgcatcgctgaaagggccttcctgaggaaagggccttcctgaggcacctggtagg

SEQ ID NO: 7978 - DNA, 55 bp, Artificial Sequence
  Synthetic polynucleotide
ggcagcacggctcaggtgccagcacggctcaggtgccagcacccacagcatcacc

SEQ ID NO: 7979 - DNA, 55 bp, Artificial Sequence
  Synthetic polynucleotide
gtactgtttctgacggaacttgcgctccaggggaacttgcgctccagggcgagga

SEQ ID NO: 7980 - DNA, 55 bp, Artificial Sequence
  Synthetic polynucleotide
ggtgcggcggaggcgggggtgcggccggggcgggggtgcggccggcgggcctccc

SEQ ID NO: 7981 - DNA, 55 bp, Artificial Sequence
  Synthetic polynucleotide
tgcggcggaggcgggggtgcggccggggcgggggtgcggccggcgggcctcccag

SEQ ID NO: 7982 - DNA, 55 bp, Artificial Sequence
  Synthetic polynucleotide
gtgcggcggaggcgggggtgcggccgaggcgggggtgcggccggcgggcctccca

SEQ ID NO: 7983 - DNA, 55 bp, Artificial Sequence
  Synthetic polynucleotide
cacgtccacgccgggcagggccacacgcgccgggcagggccacacgcgctgggcg

SEQ ID NO: 7984 - DNA, 55 bp, Artificial Sequence
  Synthetic polynucleotide
gggccaggcaagggggcggaggcctggcaagggggcggaggcctgggaggcaccg

SEQ ID NO: 7985 - DNA, 55 bp, Artificial Sequence
  Synthetic polynucleotide
cgcctcgtcgttgtaaatgggggtgtaaatgggggtgtccgcgaacttggggaag

SEQ ID NO: 7986 - DNA, 55 bp, Artificial Sequence
  Synthetic polynucleotide
gcccctttgacgggggcatctatgtctgcgggggcatctatgtctgcagggccac

SEQ ID NO: 7987 - DNA, 55 bp, Artificial Sequence
  Synthetic polynucleotide
caacagaaaaaagagggccccattccaccagggccccattccaccagatgcacaa

SEQ ID NO: 7988 - DNA, 55 bp, Artificial Sequence
  Synthetic polynucleotide
cggatgcgggtgggggtgcggcggaggcgggggtgcggcggaggcgggggtgcgg

SEQ ID NO: 7989 - DNA, 55 bp, Artificial Sequence
  Synthetic polynucleotide
ggaggaggtggtgcggcgggaggaggcggcgggaggaggcggcggtggacgcgca

SEQ ID NO: 7990 - DNA, 55 bp, Artificial Sequence
  Synthetic polynucleotide
cgggtcggcggccccggggcgacggccccggggcgacgtggagagcaggctggat

SEQ ID NO: 7991 - DNA, 55 bp, Artificial Sequence
  Synthetic polynucleotide
acgtccacgccgggcagggccacacgcgccgggcagggccacacgcgctgggcgc

SEQ ID NO: 7992 - DNA, 55 bp, Artificial Sequence
  Synthetic polynucleotide
ttagagaacgatgggagcagcaggtgtcgatgggagcagcaggtgtcggcagcag

SEQ ID NO: 7993 - DNA, 55 bp, Artificial Sequence
  Synthetic polynucleotide
cctgaagtattcattatagtcaagggcataagggcatatcctacaacaaacttgt

SEQ ID NO: 7994 - DNA, 55 bp, Artificial Sequence
  Synthetic polynucleotide
gttggccgccagagctcctcggacgctcctcggacagcggcatcgccactggcag

SEQ ID NO: 7995 - DNA, 55 bp, Artificial Sequence
  Synthetic polynucleotide
ggtcctgtgccgggagacggggctggagacggggctgctggccctgcactcggcc

SEQ ID NO: 7996 - DNA, 55 bp, Artificial Sequence
  Synthetic polynucleotide
ctgctgcccggccgccggcccgcgggcccgcgggccccgggtcccccgcgacgtc

SEQ ID NO: 7997 - DNA, 55 bp, Artificial Sequence
  Synthetic polynucleotide
tcctcctggtggttgggatggggctggatggggctggctggggccttcctggccc

SEQ ID NO: 7998 - DNA, 55 bp, Artificial Sequence
  Synthetic polynucleotide
tgccgcgtcaactgctcgggccgcgggccgcgggctgcggacgctcggtcccgcg

SEQ ID NO: 7999 - DNA, 55 bp, Artificial Sequence
  Synthetic polynucleotide
acctgcactgggaccccggggcaccgggagcggggcaccgggagcggggctccgg

SEQ ID NO: 8000 - DNA, 55 bp, Artificial Sequence
  Synthetic polynucleotide
tttcattgttcgctgaaggggaaggctcgaaggggaaggctcgcaagcgatgtag

SEQ ID NO: 8001 - DNA, 55 bp, Artificial Sequence
  Synthetic polynucleotide
ggaggtggtgcggcgggaggaggcggcgggaggaggcggcggtggacgcgcagca

SEQ ID NO: 8002 - DNA, 55 bp, Artificial Sequence
  Synthetic polynucleotide
ggccgtgctgtccctctacgcctccgcctccggcaggaccaccggtgagtgcccg

SEQ ID NO: 8003 - DNA, 55 bp, Artificial Sequence
  Synthetic polynucleotide
gcagctccacaaccacctccagcctggcctgggagataggccttgcttgctgcct

SEQ ID NO: 8004 - DNA, 55 bp, Artificial Sequence
  Synthetic polynucleotide
cacagatcgagctggagatctcggaggcatcggaggcagccagccctggcacgcg

SEQ ID NO: 8005 - DNA, 55 bp, Artificial Sequence
  Synthetic polynucleotide
atttttgcaaatggatcttacagggttacagggttacaggtgatttaggtaactg

SEQ ID NO: 8006 - DNA, 55 bp, Artificial Sequence
  Synthetic polynucleotide
ggcggcgcagcgcaaaggggcggacgctgagggcggacgctgagggcggccaggg

SEQ ID NO: 8007 - DNA, 55 bp, Artificial Sequence
  Synthetic polynucleotide
gtgctatggagaaggggaaattgcacaagccgggaaattgcacaagccaggaaag

SEQ ID NO: 8008 - DNA, 55 bp, Artificial Sequence
  Synthetic polynucleotide
ttcccgcagcccgggaaggggcatgggaaggggcatgggaagggcttctcgcccg

SEQ ID NO: 8009 - DNA, 55 bp, Artificial Sequence
  Synthetic polynucleotide
caggagcgccctgttctgaaggcaggtgcaaggcaggtgcagcatggctggcttc

SEQ ID NO: 8010 - DNA, 55 bp, Artificial Sequence
  Synthetic polynucleotide
ggccgagggcttggggtgctccgcctggcttggggtgctccgcctgcctggcgtc

SEQ ID NO: 8011 - DNA, 55 bp, Artificial Sequence
  Synthetic polynucleotide
gagaccatgttccgagcggcggctccggggcggctccggggcagctccggcgggc

SEQ ID NO: 8012 - DNA, 55 bp, Artificial Sequence
  Synthetic polynucleotide
tcgcgggggacccggggcccgcgggcccgcgggccggcggccgggcagcagctgc

SEQ ID NO: 8013 - DNA, 55 bp, Artificial Sequence
  Synthetic polynucleotide
cgtctctcggcccggcggcacacggcccggcggcacacggcccggcagaaatgca

SEQ ID NO: 8014 - DNA, 55 bp, Artificial Sequence
  Synthetic polynucleotide
cacgcacaccatctgcacgcggccgccgcgcggccgccgcaccgccgcctgcccc

SEQ ID NO: 8015 - DNA, 55 bp, Artificial Sequence
  Synthetic polynucleotide
cctgcgcgccgcgggcgtcctgctcgccgcgggcgtcctgctccgcgatccgcgt

SEQ ID NO: 8016 - DNA, 55 bp, Artificial Sequence
  Synthetic polynucleotide
gccgccatgcaggcgcagcagggccgcagcagggccgcagcagcctggtgtggct

SEQ ID NO: 8017 - DNA, 55 bp, Artificial Sequence
  Synthetic polynucleotide
acccgggggaacagcagccgcaggagccgcaggagccacaggagccgctgcagga

SEQ ID NO: 8018 - DNA, 55 bp, Artificial Sequence
  Synthetic polynucleotide
atccaagcaaaatggcacctggccccaaaatggcacctggccccgagaggtgctt

SEQ ID NO: 8019 - DNA, 55 bp, Artificial Sequence
  Synthetic polynucleotide
tttgccacagcccgggaaggggcaggggaaggggcaggggaagggtttctcgcct

SEQ ID NO: 8020 - DNA, 55 bp, Artificial Sequence
  Synthetic polynucleotide
ccctcctctgttgctgcagatccgtgggcgtgggcgtgagcgcttcgagatgttc

SEQ ID NO: 8021 - DNA, 55 bp, Artificial Sequence
  Synthetic polynucleotide
tgcagctcgggagaggagctggacttgctcaggagctggacttgctcaggggctg

SEQ ID NO: 8022 - DNA, 55 bp, Artificial Sequence
  Synthetic polynucleotide
agggagtgggggaggggctggtccattcccggggctggtccattcccggagctgg

SEQ ID NO: 8023 - DNA, 55 bp, Artificial Sequence
  Synthetic polynucleotide
ctgtctgggtgtgctcactctgccaggccagggcctgcggtccaatgtcctcttg

SEQ ID NO: 8024 - DNA, 55 bp, Artificial Sequence
  Synthetic polynucleotide
ccgccatgcaggcgcagcagggccgcagcagggccgcagcagcctggtgtggctc

SEQ ID NO: 8025 - DNA, 55 bp, Artificial Sequence
  Synthetic polynucleotide
ggcttgggccggggcggtttggggcggtttggggcgcagatagccgtgcagcgcg

SEQ ID NO: 8026 - DNA, 55 bp, Artificial Sequence
  Synthetic polynucleotide
tgcagcagcgccgcgggagcgagggagcgagggagccagggctgcgggtgtggcg

SEQ ID NO: 8027 - DNA, 55 bp, Artificial Sequence
  Synthetic polynucleotide
gataggcatgaagggctgggaggcaagggctgggaggcagggctgggcctggaca

SEQ ID NO: 8028 - DNA, 55 bp, Artificial Sequence
  Synthetic polynucleotide
cctgcactgggaccccggggcaccgggagcggggcaccgggagcggggctccggc

SEQ ID NO: 8029 - DNA, 55 bp, Artificial Sequence
  Synthetic polynucleotide
gtcgcgggggacccggggcccgcgggcccgcgggccggcggccgggcagcagctg

SEQ ID NO: 8030 - DNA, 55 bp, Artificial Sequence
  Synthetic polynucleotide
gcctcgtcgttgtaaatgggggtgtaaatgggggtgtccgcgaacttggggaaga

SEQ ID NO: 8031 - DNA, 55 bp, Artificial Sequence
  Synthetic polynucleotide
gagcgccctgttctgaaggcaggtgaaggcaggtgcagcatggctggcttcccca

SEQ ID NO: 8032 - DNA, 55 bp, Artificial Sequence
  Synthetic polynucleotide
cttcgatccagggcaaggaggtggggttgtggggttcagtgaggacagggctgag

SEQ ID NO: 8033 - DNA, 55 bp, Artificial Sequence
  Synthetic polynucleotide
agtcctcagcaaggtgcaggtgggtgcaggtgggtggagtactaggaaaaagcac

SEQ ID NO: 8034 - DNA, 55 bp, Artificial Sequence
  Synthetic polynucleotide
gcgaggccggcggcgggctcgggctgcggcgggctcgggctgcggcgcggcgctg

SEQ ID NO: 8035 - DNA, 55 bp, Artificial Sequence
  Synthetic polynucleotide
tacttgctgcggcagccggcggaccagaggcggaccagaggcggaccacgtactc

SEQ ID NO: 8036 - DNA, 55 bp, Artificial Sequence
  Synthetic polynucleotide
tgcccctttgacgggggcatctatgtctgcgggggcatctatgtctgcagggcca

SEQ ID NO: 8037 - DNA, 55 bp, Artificial Sequence
  Synthetic polynucleotide
caccctcatcacccgcggggagacggtgtggggagacggtgtccaccccactgag

SEQ ID NO: 8038 - DNA, 55 bp, Artificial Sequence
  Synthetic polynucleotide
gtccacttcccctatgcaggtgtccaacggaggtgtccaacggatgtgtgagtaa

SEQ ID NO: 8039 - DNA, 55 bp, Artificial Sequence
  Synthetic polynucleotide
tctgcagggtgtgctggaaaagggtccagatggaaaagggtccagatgatatgtt

SEQ ID NO: 8040 - DNA, 55 bp, Artificial Sequence
  Synthetic polynucleotide
gtcaggatgcatgggcatgcagggcatgcagggctgccgctccaccacaaaggca

SEQ ID NO: 8041 - DNA, 55 bp, Artificial Sequence
  Synthetic polynucleotide
aggggtgaactcggcggggaggtgctcggcggggaggtgggcggccagggtcacc

SEQ ID NO: 8042 - DNA, 55 bp, Artificial Sequence
  Synthetic polynucleotide
gccgagggcttggggtgctccgcctggcttggggtgctccgcctgcctggcgtcc

SEQ ID NO: 8043 - DNA, 55 bp, Artificial Sequence
  Synthetic polynucleotide
gcttgacgtagggcacatctgggtgcatctgggtgatacttgggtggcttgaaca

SEQ ID NO: 8044 - DNA, 55 bp, Artificial Sequence
  Synthetic polynucleotide
gtggcgctggctttgcttccagggacttccagggagtgtgtggggaagacggtga

SEQ ID NO: 8045 - DNA, 55 bp, Artificial Sequence
  Synthetic polynucleotide
ccggaccaaccgcggggccccggggccccggggccaggcgcgcagcagcaggcgg

SEQ ID NO: 8046 - DNA, 55 bp, Artificial Sequence
  Synthetic polynucleotide
ggagcaggaggaggtgggggctggggcgtgggggctggggcttggggccacagac

SEQ ID NO: 8047 - DNA, 55 bp, Artificial Sequence
  Synthetic polynucleotide
cctgctgctgcgcgcctggccccggggccccggggccccgcggttggtccgggag

SEQ ID NO: 8048 - DNA, 55 bp, Artificial Sequence
  Synthetic polynucleotide
ccatgagcctggacatggggcaaccttctcggggcaaccttctcaggccaacact

SEQ ID NO: 8049 - DNA, 55 bp, Artificial Sequence
  Synthetic polynucleotide
cccgggggcccgggaggcgaaccccccgggaggcgaacccggcaagggcggcgca

SEQ ID NO: 8050 - DNA, 55 bp, Artificial Sequence
  Synthetic polynucleotide
ttcctttgcctgggggtcttcctttgcctgggggtcttccttctatggaagaact

SEQ ID NO: 8051 - DNA, 55 bp, Artificial Sequence
  Synthetic polynucleotide
gggtgtgcctgggcatcccggggccctggtggggccctggtctgctggctccctg

SEQ ID NO: 8052 - DNA, 55 bp, Artificial Sequence
  Synthetic polynucleotide
gggagcaggaggaggtgggggctggggcgtgggggctggggcttggggccacaga

SEQ ID NO: 8053 - DNA, 55 bp, Artificial Sequence
  Synthetic polynucleotide
gcatgtccttggggccctgggggaagcctgggggaagccagggggaagccaggag

SEQ ID NO: 8054 - DNA, 55 bp, Artificial Sequence
  Synthetic polynucleotide
agaggtacggggcccggggaccaggggaccagggtggccgggagccggcgagcag

SEQ ID NO: 8055 - DNA, 55 bp, Artificial Sequence
  Synthetic polynucleotide
gcgatggcggcggggctggcgcggctggcgcggctcctgttgctcctcgggctct

SEQ ID NO: 8056 - DNA, 55 bp, Artificial Sequence
  Synthetic polynucleotide
tgctgctgcgcgcctggccccggggccccggggccccgcggttggtccgggagcc

SEQ ID NO: 8057 - DNA, 55 bp, Artificial Sequence
  Synthetic polynucleotide
aaatggtccaacagaaaaaagagggaaagagggccccattccaccagatgcacaa

SEQ ID NO: 8058 - DNA, 55 bp, Artificial Sequence
  Synthetic polynucleotide
cctcgccacacagggtgctcacggccatgcgggtgctcacggccatgcccaggaa

SEQ ID NO: 8059 - DNA, 55 bp, Artificial Sequence
  Synthetic polynucleotide
attacgacgttggctgggagagtccgacgttggctgggagagtcctcacaatggc

SEQ ID NO: 8060 - DNA, 55 bp, Artificial Sequence
  Synthetic polynucleotide
cacttctttgctgctggttccatgtgctgctggttccatgatatcatatccttgc

SEQ ID NO: 8061 - DNA, 55 bp, Artificial Sequence
  Synthetic polynucleotide
accgacgacgcccgccttgggggcgaggcggggcgaggcggcccggggggcctcg

SEQ ID NO: 8062 - DNA, 55 bp, Artificial Sequence
  Synthetic polynucleotide
cgggaccgagcgtccgcagcccgcggcccgcggcccgagcagttgacgcggcagg

SEQ ID NO: 8063 - DNA, 55 bp, Artificial Sequence
  Synthetic polynucleotide
gtcgtaatcgctggtgctgaagcctcctgctggtgctgaagcctcctgcggccga

SEQ ID NO: 8064 - DNA, 55 bp, Artificial Sequence
  Synthetic polynucleotide
cttttcctcccaggtggccgtcgaggaccgaggaccgagtcaggcagctgcatga

SEQ ID NO: 8065 - DNA, 55 bp, Artificial Sequence
  Synthetic polynucleotide
caccatggcatagaggtcgatggccccgtctggccccgtctgccagccgctgcag

SEQ ID NO: 8066 - DNA, 55 bp, Artificial Sequence
  Synthetic polynucleotide
gcacaacccatggctgcgctgggctgcgctgggctgcgcgaggctgaggtgggcg

SEQ ID NO: 8067 - DNA, 55 bp, Artificial Sequence
  Synthetic polynucleotide
tgttggtaacgctggtcctgctggtcctgctggtcccgccggtccccgtggtgaa

SEQ ID NO: 8068 - DNA, 55 bp, Artificial Sequence
  Synthetic polynucleotide
gggggtgcggcggaggcgggggtgcggccgaggcgggggtgcggccggcgggcct

SEQ ID NO: 8069 - DNA, 55 bp, Artificial Sequence
  Synthetic polynucleotide
tcatcagctccccccaggaggtgaggttgcaggaggtgaggttgcagtaggtgag

SEQ ID NO: 8070 - DNA, 55 bp, Artificial Sequence
  Synthetic polynucleotide
aggcgggtcgggggcggggctgggctgggctgggctggaaggtgagctcgggaac

SEQ ID NO: 8071 - DNA, 55 bp, Artificial Sequence
  Synthetic polynucleotide
ctgctgctgcgcgcctggccccggggccccggggccccgcggttggtccgggagc

SEQ ID NO: 8072 - DNA, 55 bp, Artificial Sequence
  Synthetic polynucleotide
agcgagcgctgggctgtgggcagtgggcagtggaaactgcagccgctggggctca

SEQ ID NO: 8073 - DNA, 55 bp, Artificial Sequence
  Synthetic polynucleotide
aacagcaccagcaggaccaacaggaccaacaggaccagaaggaccctgtgaaatg

SEQ ID NO: 8074 - DNA, 55 bp, Artificial Sequence
  Synthetic polynucleotide
acaccccacagggtggagggtggaacgtggtggagggtggaacgtgcggctgcgt

SEQ ID NO: 8075 - DNA, 55 bp, Artificial Sequence
  Synthetic polynucleotide
gagggagtgggggaggggctggtccattcccggggctggtccattcccggagctg

SEQ ID NO: 8076 - DNA, 55 bp, Artificial Sequence
  Synthetic polynucleotide
gccaccaagggctgccttcgggccgccttcgggccctggccatgaagttcaagac

SEQ ID NO: 8077 - DNA, 55 bp, Artificial Sequence
  Synthetic polynucleotide
accactccaccttcgtgggcaaggtgtggcgggcaaggtgtggctcacggtgctg

SEQ ID NO: 8078 - DNA, 55 bp, Artificial Sequence
  Synthetic polynucleotide
cggaggaaccgtttcaagtggggcccagcggggcccagcatcccagcagatcctg

SEQ ID NO: 8079 - DNA, 55 bp, Artificial Sequence
  Synthetic polynucleotide
tgctcggccgcaggaggcttcagcaccagcaggaggcttcagcaccagcgattac

SEQ ID NO: 8080 - DNA, 55 bp, Artificial Sequence
  Synthetic polynucleotide
ggaaggaggcgaaggccggccggtcggcgaaggccggccggtcggcgaaggccga

SEQ ID NO: 8081 - DNA, 55 bp, Artificial Sequence
  Synthetic polynucleotide
aggcggcgcagcgcaaaggggcggacgctgagggcggacgctgagggcggccagg

SEQ ID NO: 8082 - DNA, 55 bp, Artificial Sequence
  Synthetic polynucleotide
gagttctgctacgcggtggaggcagggtggaggcagcgtatgtgaccccagtcct

SEQ ID NO: 8083 - DNA, 55 bp, Artificial Sequence
  Synthetic polynucleotide
ccaccgtgccacaggtggcggtgttgtacgtggcggtgttgtacttggcgtgcag

SEQ ID NO: 8084 - DNA, 55 bp, Artificial Sequence
  Synthetic polynucleotide
acgaggaaaactgcggtatgggcggggccagggcggggccagggtgggggcgggg

SEQ ID NO: 8085 - DNA, 55 bp, Artificial Sequence
  Synthetic polynucleotide
ctgggcgccgaggaggagatggaggccgggaggccgggcggccgcggcccgtgct

SEQ ID NO: 8086 - DNA, 55 bp, Artificial Sequence
  Synthetic polynucleotide
catccacacagcagcggacctcgggagcagcggacctcgggggcggcggcgccca

SEQ ID NO: 8087 - DNA, 55 bp, Artificial Sequence
  Synthetic polynucleotide
gcggaatcaaaagggtcgaggtaagggaaaagggtcgaggtaagggaaaagcttc

SEQ ID NO: 8088 - DNA, 55 bp, Artificial Sequence
  Synthetic polynucleotide
acctcgccacacagggtgctcacggccatgcgggtgctcacggccatgcccagga

SEQ ID NO: 8089 - DNA, 55 bp, Artificial Sequence
  Synthetic polynucleotide
tcctttgcctgggggtcttcctttgcctgggggtcttccttctatggaagaactg

SEQ ID NO: 8090 - DNA, 55 bp, Artificial Sequence
  Synthetic polynucleotide
gcaccctcatcacccgcggggagacggtgtggggagacggtgtccaccccactga

SEQ ID NO: 8091 - DNA, 55 bp, Artificial Sequence
  Synthetic polynucleotide
cgacgttggctgggagagtccgacgttggctgggagagtcctcacaatggctcgg

SEQ ID NO: 8092 - DNA, 55 bp, Artificial Sequence
  Synthetic polynucleotide
gagcaggaggaggtgggggctggggcgtgggggctggggcttggggccacagaca

SEQ ID NO: 8093 - DNA, 55 bp, Artificial Sequence
  Synthetic polynucleotide
gcgctgtgaccgcaagatggaggtgggaggtggcgttcatggtgtgtgccatcaa

SEQ ID NO: 8094 - DNA, 55 bp, Artificial Sequence
  Synthetic polynucleotide
cgcaccctcatcacccgcggggagacggtgtggggagacggtgtccaccccactg

SEQ ID NO: 8095 - DNA, 55 bp, Artificial Sequence
  Synthetic polynucleotide
ttgccacagcccgggaaggggcaggggaaggggcaggggaagggtttctcgcctg

SEQ ID NO: 8096 - DNA, 55 bp, Artificial Sequence
  Synthetic polynucleotide
ctccagcccgggtcggcggccccggggcgacggccccggggcgacgtggagagca

SEQ ID NO: 8097 - DNA, 55 bp, Artificial Sequence
  Synthetic polynucleotide
ctaggacctcttgggccaacagcaccagcagggccaacagcaccagcaggaccaa

SEQ ID NO: 8098 - DNA, 55 bp, Artificial Sequence
  Synthetic polynucleotide
gctgcgttgcagctggggctgcgttgcagctggggctgcgggcggcggggctggg

SEQ ID NO: 8099 - DNA, 55 bp, Artificial Sequence
  Synthetic polynucleotide
gctccacctgtagcacaagaggccttaaaaaggccttaaaaaaggaacttgaaac

SEQ ID NO: 8100 - DNA, 55 bp, Artificial Sequence
  Synthetic polynucleotide
gagcatgtccttggggccctgggggaagcctgggggaagccagggggaagccagg

SEQ ID NO: 8101 - DNA, 55 bp, Artificial Sequence
  Synthetic polynucleotide
tggtctcccaggggcagccgggcacgaaggtgggcagccgggcacgaaggtggcc

SEQ ID NO: 8102 - DNA, 55 bp, Artificial Sequence
  Synthetic polynucleotide
tccatgagcctggacatggggcaaccttctcggggcaaccttctcaggccaacac

SEQ ID NO: 8103 - DNA, 55 bp, Artificial Sequence
  Synthetic polynucleotide
tgagccggcctcggctggtgctgcctcggctggtgctgccgcggctggcgctgcc

SEQ ID NO: 8104 - DNA, 55 bp, Artificial Sequence
  Synthetic polynucleotide
gcgcagggtgtagcggagggcgcggggcgcggggccgggcgccgccagcggcgtg

SEQ ID NO: 8105 - DNA, 55 bp, Artificial Sequence
  Synthetic polynucleotide
tgcgccgcccttgccgggttcgcctcccggggggttcgcctcccgggcccccggg

SEQ ID NO: 8106 - DNA, 55 bp, Artificial Sequence
  Synthetic polynucleotide
ataggcatgaagggctgggaggcaagggctgggaggcagggctgggcctggacat

SEQ ID NO: 8107 - DNA, 55 bp, Artificial Sequence
  Synthetic polynucleotide
ctgggaggcccgccggccgcacccccgcctcggccgcacccccgcctccgccgca

SEQ ID NO: 8108 - DNA, 55 bp, Artificial Sequence
  Synthetic polynucleotide
ggtctgctgcagggaggcccggatgctgaagggaggcccggatgctgatggacac

SEQ ID NO: 8109 - DNA, 55 bp, Artificial Sequence
  Synthetic polynucleotide
gcctgcaggctgagcgagcgcaggcggcgcaggcggcgcaggccctgcagcgagc

SEQ ID NO: 8110 - DNA, 55 bp, Artificial Sequence
  Synthetic polynucleotide
cgggggctccgggcagtgctggcggcgtcctggcggcgtcctggctgccctgctg

SEQ ID NO: 8111 - DNA, 55 bp, Artificial Sequence
  Synthetic polynucleotide
ggggtgaactcggcggggaggtgctcggcggggaggtgggcggccagggtcacca

SEQ ID NO: 8112 - DNA, 55 bp, Artificial Sequence
  Synthetic polynucleotide
catgtccttggggccctgggggaagcctgggggaagccagggggaagccaggagt

SEQ ID NO: 8113 - DNA, 55 bp, Artificial Sequence
  Synthetic polynucleotide
tgaggccgccaggcgggtcgggggcgggcgggggcggggctgggctggaaggtga

SEQ ID NO: 8114 - DNA, 55 bp, Artificial Sequence
  Synthetic polynucleotide
ggcgcagggcgggggccgcggcgcgggggcgggggccgcggcgcgggggcggggg

SEQ ID NO: 8115 - DNA, 55 bp, Artificial Sequence
  Synthetic polynucleotide
ggcgcagggtgtagcggagggcgcggggcgcggggccgggcgccgccagcggcgt

SEQ ID NO: 8116 - DNA, 55 bp, Artificial Sequence
  Synthetic polynucleotide
gcacgcagagtggaaggccaggcaggtggaaggccaggcactatggaacaggcta

SEQ ID NO: 8117 - DNA, 20 bp, Artificial Sequence
  Synthetic polynucleotide
gctggtgctgttggccctgc

SEQ ID NO: 8118 - DNA, 20 bp, Artificial Sequence
  Synthetic polynucleotide
ggcgggggtgcggccggggc

SEQ ID NO: 8119 - DNA, 20 bp, Artificial Sequence
  Synthetic polynucleotide
aggcgggggtgcggccgagg

SEQ ID NO: 8120 - DNA, 20 bp, Artificial Sequence
  Synthetic polynucleotide
ctctgcggcaagtccctctg

SEQ ID NO: 8121 - DNA, 20 bp, Artificial Sequence
  Synthetic polynucleotide
ccaggtgccattttggggcc

SEQ ID NO: 8122 - DNA, 20 bp, Artificial Sequence
  Synthetic polynucleotide
catggccgtgagcacccgca

SEQ ID NO: 8123 - DNA, 20 bp, Artificial Sequence
  Synthetic polynucleotide
gtggccctgcccggcgcgtg

SEQ ID NO: 8124 - DNA, 20 bp, Artificial Sequence
  Synthetic polynucleotide
cggcggcggggagccccggg

SEQ ID NO: 8125 - DNA, 20 bp, Artificial Sequence
  Synthetic polynucleotide
ctgggtgtggctcccctggc

SEQ ID NO: 8126 - DNA, 20 bp, Artificial Sequence
  Synthetic polynucleotide
ctggtccggcaggtgtcgtc

SEQ ID NO: 8127 - DNA, 20 bp, Artificial Sequence
  Synthetic polynucleotide
cggccagccagccccggtac

SEQ ID NO: 8128 - DNA, 20 bp, Artificial Sequence
  Synthetic polynucleotide
ctcggcggggaggtgctcgg

SEQ ID NO: 8129 - DNA, 20 bp, Artificial Sequence
  Synthetic polynucleotide
tgaaggcatccttgctctga

SEQ ID NO: 8130 - DNA, 20 bp, Artificial Sequence
  Synthetic polynucleotide
gcgtggtaaacttttgggcg

SEQ ID NO: 8131 - DNA, 20 bp, Artificial Sequence
  Synthetic polynucleotide
tccggcaggtgtcgtccggc

SEQ ID NO: 8132 - DNA, 20 bp, Artificial Sequence
  Synthetic polynucleotide
aaccggggcactgcagctac

SEQ ID NO: 8133 - DNA, 20 bp, Artificial Sequence
  Synthetic polynucleotide
gggcaaggaggtggggttgt

SEQ ID NO: 8134 - DNA, 20 bp, Artificial Sequence
  Synthetic polynucleotide
catctggacccttttccatc

SEQ ID NO: 8135 - DNA, 20 bp, Artificial Sequence
  Synthetic polynucleotide
agagtgttcatctgggaatc

SEQ ID NO: 8136 - DNA, 20 bp, Artificial Sequence
  Synthetic polynucleotide
ttggggtgctccgcctggct

SEQ ID NO: 8137 - DNA, 20 bp, Artificial Sequence
  Synthetic polynucleotide
agggggcggaggcctggcaa

SEQ ID NO: 8138 - DNA, 20 bp, Artificial Sequence
  Synthetic polynucleotide
gaacctgggcaagctggacc

SEQ ID NO: 8139 - DNA, 20 bp, Artificial Sequence
  Synthetic polynucleotide
catccgttggacacctccgt

SEQ ID NO: 8140 - DNA, 20 bp, Artificial Sequence
  Synthetic polynucleotide
tggctgggagagtccgacgt

SEQ ID NO: 8141 - DNA, 20 bp, Artificial Sequence
  Synthetic polynucleotide
cttctcatgtctccggtctc

SEQ ID NO: 8142 - DNA, 20 bp, Artificial Sequence
  Synthetic polynucleotide
tgtgccacatggctcccaca

SEQ ID NO: 8143 - DNA, 20 bp, Artificial Sequence
  Synthetic polynucleotide
gaggcccggatgctgaaggg

SEQ ID NO: 8144 - DNA, 20 bp, Artificial Sequence
  Synthetic polynucleotide
aaggttggctgtaccaaggt

SEQ ID NO: 8145 - DNA, 20 bp, Artificial Sequence
  Synthetic polynucleotide
tcggcggggaggtgctcggc

SEQ ID NO: 8146 - DNA, 20 bp, Artificial Sequence
  Synthetic polynucleotide
ttggtatgttatcgttggct

SEQ ID NO: 8147 - DNA, 20 bp, Artificial Sequence
  Synthetic polynucleotide
ctggtggaatggggccctgg

SEQ ID NO: 8148 - DNA, 20 bp, Artificial Sequence
  Synthetic polynucleotide
ccctggagcgcaagttcccc

SEQ ID NO: 8149 - DNA, 20 bp, Artificial Sequence
  Synthetic polynucleotide
tactgtcggatttctgctgt

SEQ ID NO: 8150 - DNA, 20 bp, Artificial Sequence
  Synthetic polynucleotide
cagctggagtggatgccagc

SEQ ID NO: 8151 - DNA, 20 bp, Artificial Sequence
  Synthetic polynucleotide
gtcggaggagacgtagaggt

SEQ ID NO: 8152 - DNA, 20 bp, Artificial Sequence
  Synthetic polynucleotide
gaaaagggtccagatggaaa

SEQ ID NO: 8153 - DNA, 20 bp, Artificial Sequence
  Synthetic polynucleotide
aaagggccttcctgaggaaa

SEQ ID NO: 8154 - DNA, 20 bp, Artificial Sequence
  Synthetic polynucleotide
ctgctggttccatgtgctgc

SEQ ID NO: 8155 - DNA, 20 bp, Artificial Sequence
  Synthetic polynucleotide
tggagggtggaacgtggtgg

SEQ ID NO: 8156 - DNA, 20 bp, Artificial Sequence
  Synthetic polynucleotide
cccgaggtccgctgctcccg

SEQ ID NO: 8157 - DNA, 20 bp, Artificial Sequence
  Synthetic polynucleotide
aatggcacctggccccaaaa

SEQ ID NO: 8158 - DNA, 20 bp, Artificial Sequence
  Synthetic polynucleotide
ttgcttcaggcccttgcttc

SEQ ID NO: 8159 - DNA, 20 bp, Artificial Sequence
  Synthetic polynucleotide
gagcagcggcagaaaaacag

SEQ ID NO: 8160 - DNA, 20 bp, Artificial Sequence
  Synthetic polynucleotide
ctgcagaaggtgactgcaga

SEQ ID NO: 8161 - DNA, 20 bp, Artificial Sequence
  Synthetic polynucleotide
ggtcaactggtagacacaac

SEQ ID NO: 8162 - DNA, 20 bp, Artificial Sequence
  Synthetic polynucleotide
caaggacaaatctgactgca

SEQ ID NO: 8163 - DNA, 20 bp, Artificial Sequence
  Synthetic polynucleotide
agagtggaaggccaggcagg

SEQ ID NO: 8164 - DNA, 20 bp, Artificial Sequence
  Synthetic polynucleotide
agggcacatctgggtgcatc

SEQ ID NO: 8165 - DNA, 20 bp, Artificial Sequence
  Synthetic polynucleotide
tgggagagtccgacgttggc

SEQ ID NO: 8166 - DNA, 20 bp, Artificial Sequence
  Synthetic polynucleotide
ttgtaaatgggggtgtaaat

SEQ ID NO: 8167 - DNA, 20 bp, Artificial Sequence
  Synthetic polynucleotide
ctgctgccggcactggacac

SEQ ID NO: 8168 - DNA, 20 bp, Artificial Sequence
  Synthetic polynucleotide
tacctcacggtgggccttca

SEQ ID NO: 8169 - DNA, 20 bp, Artificial Sequence
  Synthetic polynucleotide
tctcatggatgagacgctca

SEQ ID NO: 8170 - DNA, 20 bp, Artificial Sequence
  Synthetic polynucleotide
aagggggcggaggcctggca

SEQ ID NO: 8171 - DNA, 20 bp, Artificial Sequence
  Synthetic polynucleotide
agctggacttgctcaggagc

SEQ ID NO: 8172 - DNA, 20 bp, Artificial Sequence
  Synthetic polynucleotide
tattgatggacatttattga

SEQ ID NO: 8173 - DNA, 20 bp, Artificial Sequence
  Synthetic polynucleotide
ggcccggaggctgggcggcc

SEQ ID NO: 8174 - DNA, 20 bp, Artificial Sequence
  Synthetic polynucleotide
gcgaagatggctcggaggct

SEQ ID NO: 8175 - DNA, 20 bp, Artificial Sequence
  Synthetic polynucleotide
gcggaaatgcttgatttcag

SEQ ID NO: 8176 - DNA, 20 bp, Artificial Sequence
  Synthetic polynucleotide
acacactccctggaagtccc

SEQ ID NO: 8177 - DNA, 20 bp, Artificial Sequence
  Synthetic polynucleotide
gcgggggtgcggccgaggcg

SEQ ID NO: 8178 - DNA, 20 bp, Artificial Sequence
  Synthetic polynucleotide
cgtgctggcgctcttcgtgc

SEQ ID NO: 8179 - DNA, 20 bp, Artificial Sequence
  Synthetic polynucleotide
ccacacgggccttgacgtac

SEQ ID NO: 8180 - DNA, 20 bp, Artificial Sequence
  Synthetic polynucleotide
ggcagcggcggcagctgcag

SEQ ID NO: 8181 - DNA, 20 bp, Artificial Sequence
  Synthetic polynucleotide
gaggcttcagcaccagcagg

SEQ ID NO: 8182 - DNA, 20 bp, Artificial Sequence
  Synthetic polynucleotide
gcggagcaccccaagccagg

SEQ ID NO: 8183 - DNA, 20 bp, Artificial Sequence
  Synthetic polynucleotide
gagtgttcatctgggaatct

SEQ ID NO: 8184 - DNA, 20 bp, Artificial Sequence
  Synthetic polynucleotide
cggcggggaggtgctcggcg

SEQ ID NO: 8185 - DNA, 20 bp, Artificial Sequence
  Synthetic polynucleotide
cagggcagcgatgcactcac

SEQ ID NO: 8186 - DNA, 20 bp, Artificial Sequence
  Synthetic polynucleotide
tgcttggagcagggggtgct

SEQ ID NO: 8187 - DNA, 20 bp, Artificial Sequence
  Synthetic polynucleotide
cggggcggtttggggcggtt

SEQ ID NO: 8188 - DNA, 20 bp, Artificial Sequence
  Synthetic polynucleotide
agacgcaggaagaaagacgc

SEQ ID NO: 8189 - DNA, 20 bp, Artificial Sequence
  Synthetic polynucleotide
ttgaaggccatcacgtatga

SEQ ID NO: 8190 - DNA, 20 bp, Artificial Sequence
  Synthetic polynucleotide
caggccagtgacaatgagtc

SEQ ID NO: 8191 - DNA, 20 bp, Artificial Sequence
  Synthetic polynucleotide
cacctggatgagacggtccc

SEQ ID NO: 8192 - DNA, 20 bp, Artificial Sequence
  Synthetic polynucleotide
ggcggtgcagccgaaggagg

SEQ ID NO: 8193 - DNA, 20 bp, Artificial Sequence
  Synthetic polynucleotide
tccaaagatggtcaaggtca

SEQ ID NO: 8194 - DNA, 20 bp, Artificial Sequence
  Synthetic polynucleotide
tgggagcagcaggtgtcgat

SEQ ID NO: 8195 - DNA, 20 bp, Artificial Sequence
  Synthetic polynucleotide
tggcctgcacagactggtta

SEQ ID NO: 8196 - DNA, 20 bp, Artificial Sequence
  Synthetic polynucleotide
cgggaggcgaaccccccggg

SEQ ID NO: 8197 - DNA, 20 bp, Artificial Sequence
  Synthetic polynucleotide
acatctactcgctggtgagc

SEQ ID NO: 8198 - DNA, 20 bp, Artificial Sequence
  Synthetic polynucleotide
tgcggtccgggactgcggtc

SEQ ID NO: 8199 - DNA, 20 bp, Artificial Sequence
  Synthetic polynucleotide
actctgcggcaagtcctctg

SEQ ID NO: 8200 - DNA, 20 bp, Artificial Sequence
  Synthetic polynucleotide
tgactaatctggatcctatc

SEQ ID NO: 8201 - DNA, 20 bp, Artificial Sequence
  Synthetic polynucleotide
aacctgggcaagctggacct

SEQ ID NO: 8202 - DNA, 20 bp, Artificial Sequence
  Synthetic polynucleotide
cgatcaccgtgcggcacgtg

SEQ ID NO: 8203 - DNA, 20 bp, Artificial Sequence
  Synthetic polynucleotide
cgctgaaggggaaggctcga

SEQ ID NO: 8204 - DNA, 20 bp, Artificial Sequence
  Synthetic polynucleotide
tttgatgaggaggaaggatg

SEQ ID NO: 8205 - DNA, 20 bp, Artificial Sequence
  Synthetic polynucleotide
ttaggtgggcttagatttgt

SEQ ID NO: 8206 - DNA, 20 bp, Artificial Sequence
  Synthetic polynucleotide
gctgaaggggaaggctcgaa

SEQ ID NO: 8207 - DNA, 20 bp, Artificial Sequence
  Synthetic polynucleotide
gcaggacgcccgcggcgagc

SEQ ID NO: 8208 - DNA, 20 bp, Artificial Sequence
  Synthetic polynucleotide
gttgtaaatgggggtgtaaa

SEQ ID NO: 8209 - DNA, 20 bp, Artificial Sequence
  Synthetic polynucleotide
ggtcacgctacctggcgacc

SEQ ID NO: 8210 - DNA, 20 bp, Artificial Sequence
  Synthetic polynucleotide
gcaaggatgccttcagagca

SEQ ID NO: 8211 - DNA, 20 bp, Artificial Sequence
  Synthetic polynucleotide
atgatggctggcatgatggc

SEQ ID NO: 8212 - DNA, 20 bp, Artificial Sequence
  Synthetic polynucleotide
cggcgggctcgggctgcggc

SEQ ID NO: 8213 - DNA, 20 bp, Artificial Sequence
  Synthetic polynucleotide
tagtcacatgattggcagat

SEQ ID NO: 8214 - DNA, 20 bp, Artificial Sequence
  Synthetic polynucleotide
ttccgggctaaagaagcccc

SEQ ID NO: 8215 - DNA, 20 bp, Artificial Sequence
  Synthetic polynucleotide
ctttgcttccagggacttcc

SEQ ID NO: 8216 - DNA, 20 bp, Artificial Sequence
  Synthetic polynucleotide
ggagccttcgatgcggaatg

SEQ ID NO: 8217 - DNA, 20 bp, Artificial Sequence
  Synthetic polynucleotide
agtacactatcctggaatcc

SEQ ID NO: 8218 - DNA, 20 bp, Artificial Sequence
  Synthetic polynucleotide
gaatggaccagccccgggaa

SEQ ID NO: 8219 - DNA, 20 bp, Artificial Sequence
  Synthetic polynucleotide
ttctgaaggcaggtgaaggc

SEQ ID NO: 8220 - DNA, 20 bp, Artificial Sequence
  Synthetic polynucleotide
aggaggactcactggttcac

SEQ ID NO: 8221 - DNA, 20 bp, Artificial Sequence
  Synthetic polynucleotide
tctgaaggcaggtgcaaggc

SEQ ID NO: 8222 - DNA, 20 bp, Artificial Sequence
  Synthetic polynucleotide
gggtggagggtggaacgtgg

SEQ ID NO: 8223 - DNA, 20 bp, Artificial Sequence
  Synthetic polynucleotide
agcaaggtgcaggtgggtgc

SEQ ID NO: 8224 - DNA, 20 bp, Artificial Sequence
  Synthetic polynucleotide
gagtccagtgaaatggaaaa

SEQ ID NO: 8225 - DNA, 20 bp, Artificial Sequence
  Synthetic polynucleotide
cgtggccgacctgtctatcg

SEQ ID NO: 8226 - DNA, 20 bp, Artificial Sequence
  Synthetic polynucleotide
aaaggttctgctagtgataa

SEQ ID NO: 8227 - DNA, 20 bp, Artificial Sequence
  Synthetic polynucleotide
agtcctgctgatgctagcta

SEQ ID NO: 8228 - DNA, 20 bp, Artificial Sequence
  Synthetic polynucleotide
ggacagactctggatgactc

SEQ ID NO: 8229 - DNA, 20 bp, Artificial Sequence
  Synthetic polynucleotide
acgcatgtctcgcggtaccg

SEQ ID NO: 8230 - DNA, 20 bp, Artificial Sequence
  Synthetic polynucleotide
aggctgtgcgggaaatgtgc

SEQ ID NO: 8231 - DNA, 20 bp, Artificial Sequence
  Synthetic polynucleotide
gtagatcggctgctgcagat

SEQ ID NO: 8232 - DNA, 20 bp, Artificial Sequence
  Synthetic polynucleotide
cggccctggacgtgggtacg

SEQ ID NO: 8233 - DNA, 20 bp, Artificial Sequence
  Synthetic polynucleotide
ttcaggatgagactggagac

SEQ ID NO: 8234 - DNA, 20 bp, Artificial Sequence
  Synthetic polynucleotide
tcgttcctccgagctggagc

SEQ ID NO: 8235 - DNA, 20 bp, Artificial Sequence
  Synthetic polynucleotide
aggtgggagaaggtgagaga

SEQ ID NO: 8236 - DNA, 20 bp, Artificial Sequence
  Synthetic polynucleotide
tcagtggatcaagtttacag

SEQ ID NO: 8237 - DNA, 20 bp, Artificial Sequence
  Synthetic polynucleotide
tcatcagtggggcgctggag

SEQ ID NO: 8238 - DNA, 20 bp, Artificial Sequence
  Synthetic polynucleotide
ctcatgataaggatgatata

SEQ ID NO: 8239 - DNA, 20 bp, Artificial Sequence
  Synthetic polynucleotide
taggtccaggtgctgggtcc

SEQ ID NO: 8240 - DNA, 20 bp, Artificial Sequence
  Synthetic polynucleotide
tggggtgctccgcctggctt

SEQ ID NO: 8241 - DNA, 20 bp, Artificial Sequence
  Synthetic polynucleotide
gggcatggctctctggggca

SEQ ID NO: 8242 - DNA, 20 bp, Artificial Sequence
  Synthetic polynucleotide
gcagcggacctcgggagcag

SEQ ID NO: 8243 - DNA, 20 bp, Artificial Sequence
  Synthetic polynucleotide
agcggtgcatgggctgcgca

SEQ ID NO: 8244 - DNA, 20 bp, Artificial Sequence
  Synthetic polynucleotide
gactggatcacagggatcac

SEQ ID NO: 8245 - DNA, 20 bp, Artificial Sequence
  Synthetic polynucleotide
ttgtgccacatggctccaca

SEQ ID NO: 8246 - DNA, 20 bp, Artificial Sequence
  Synthetic polynucleotide
aaggtgcaggtgggtgcagg

SEQ ID NO: 8247 - DNA, 20 bp, Artificial Sequence
  Synthetic polynucleotide
tatttgttcttacaggcaac

SEQ ID NO: 8248 - DNA, 20 bp, Artificial Sequence
  Synthetic polynucleotide
ggtggcggtgttgtacgtgg

SEQ ID NO: 8249 - DNA, 20 bp, Artificial Sequence
  Synthetic polynucleotide
cctgcgaacatacctagcta

SEQ ID NO: 8250 - DNA, 20 bp, Artificial Sequence
  Synthetic polynucleotide
atggtgctgctgccccgaaa

SEQ ID NO: 8251 - DNA, 20 bp, Artificial Sequence
  Synthetic polynucleotide
tcaccagtgtgggcttcgtg

SEQ ID NO: 8252 - DNA, 20 bp, Artificial Sequence
  Synthetic polynucleotide
tgggccggggcggtttgggg

SEQ ID NO: 8253 - DNA, 20 bp, Artificial Sequence
  Synthetic polynucleotide
caacatggcagcagccaaca

SEQ ID NO: 8254 - DNA, 20 bp, Artificial Sequence
  Synthetic polynucleotide
cgatgacggcattggcgcat

SEQ ID NO: 8255 - DNA, 20 bp, Artificial Sequence
  Synthetic polynucleotide
gggcggcggccggaagggcg

SEQ ID NO: 8256 - DNA, 20 bp, Artificial Sequence
  Synthetic polynucleotide
ctcacggtgggccttcacgg

SEQ ID NO: 8257 - DNA, 20 bp, Artificial Sequence
  Synthetic polynucleotide
gactttaggcagaggctggc

SEQ ID NO: 8258 - DNA, 20 bp, Artificial Sequence
  Synthetic polynucleotide
ccaggggacccaggagaccc

SEQ ID NO: 8259 - DNA, 20 bp, Artificial Sequence
  Synthetic polynucleotide
gcagctgacagagggttaga

SEQ ID NO: 8260 - DNA, 20 bp, Artificial Sequence
  Synthetic polynucleotide
aggtaacccaggagaaagtc

SEQ ID NO: 8261 - DNA, 20 bp, Artificial Sequence
  Synthetic polynucleotide
cgggctcggactacggacta

SEQ ID NO: 8262 - DNA, 20 bp, Artificial Sequence
  Synthetic polynucleotide
gaggtccgctgctgcccccg

SEQ ID NO: 8263 - DNA, 20 bp, Artificial Sequence
  Synthetic polynucleotide
cagcaggggaggcccccagc

SEQ ID NO: 8264 - DNA, 20 bp, Artificial Sequence
  Synthetic polynucleotide
aggcggtcggcgggcgcggt

SEQ ID NO: 8265 - DNA, 20 bp, Artificial Sequence
  Synthetic polynucleotide
catgaccttcctgcagccag

SEQ ID NO: 8266 - DNA, 20 bp, Artificial Sequence
  Synthetic polynucleotide
tgctctctgtgtagtggtag

SEQ ID NO: 8267 - DNA, 20 bp, Artificial Sequence
  Synthetic polynucleotide
cggcgcggtggcgcgggagg

SEQ ID NO: 8268 - DNA, 20 bp, Artificial Sequence
  Synthetic polynucleotide
gacggcatgctgctggctgc

SEQ ID NO: 8269 - DNA, 20 bp, Artificial Sequence
  Synthetic polynucleotide
acgccggcatctcaggccgc

SEQ ID NO: 8270 - DNA, 20 bp, Artificial Sequence
  Synthetic polynucleotide
ccacactggcaagtccacac

SEQ ID NO: 8271 - DNA, 20 bp, Artificial Sequence
  Synthetic polynucleotide
aagaataggcacaatagaat

SEQ ID NO: 8272 - DNA, 20 bp, Artificial Sequence
  Synthetic polynucleotide
aagccgcagacgtcggccgt

SEQ ID NO: 8273 - DNA, 20 bp, Artificial Sequence
  Synthetic polynucleotide
aagactgctcagggctactc

SEQ ID NO: 8274 - DNA, 20 bp, Artificial Sequence
  Synthetic polynucleotide
cgatggaggggccggactgg

SEQ ID NO: 8275 - DNA, 20 bp, Artificial Sequence
  Synthetic polynucleotide
cgcggtgcggtccgggactg

SEQ ID NO: 8276 - DNA, 20 bp, Artificial Sequence
  Synthetic polynucleotide
cctggtgctgtaggtgctca

SEQ ID NO: 8277 - DNA, 20 bp, Artificial Sequence
  Synthetic polynucleotide
cgagtccgactccggtactc

SEQ ID NO: 8278 - DNA, 20 bp, Artificial Sequence
  Synthetic polynucleotide
ctcaggtgccagcacggctc

SEQ ID NO: 8279 - DNA, 20 bp, Artificial Sequence
  Synthetic polynucleotide
gagcttgctcctttctttct

SEQ ID NO: 8280 - DNA, 20 bp, Artificial Sequence
  Synthetic polynucleotide
cccccaggaggtgaggttgc

SEQ ID NO: 8281 - DNA, 20 bp, Artificial Sequence
  Synthetic polynucleotide
gcagggtcagcctggaggcc

SEQ ID NO: 8282 - DNA, 20 bp, Artificial Sequence
  Synthetic polynucleotide
gaactcggcggggaggtgct

SEQ ID NO: 8283 - DNA, 20 bp, Artificial Sequence
  Synthetic polynucleotide
agacatcatgtgcggggatg

SEQ ID NO: 8284 - DNA, 20 bp, Artificial Sequence
  Synthetic polynucleotide
ggaccgggagcaccaggacc

SEQ ID NO: 8285 - DNA, 20 bp, Artificial Sequence
  Synthetic polynucleotide
ttgtagatggccatggccca

SEQ ID NO: 8286 - DNA, 20 bp, Artificial Sequence
  Synthetic polynucleotide
cgctacctggcgcggctccc

SEQ ID NO: 8287 - DNA, 20 bp, Artificial Sequence
  Synthetic polynucleotide
agacggctaggtgctccaga

SEQ ID NO: 8288 - DNA, 20 bp, Artificial Sequence
  Synthetic polynucleotide
atgagctcactgttctgttc

SEQ ID NO: 8289 - DNA, 20 bp, Artificial Sequence
  Synthetic polynucleotide
tctgaagaacagaacagaac

SEQ ID NO: 8290 - DNA, 20 bp, Artificial Sequence
  Synthetic polynucleotide
atgtgatagaaaagctgggc

SEQ ID NO: 8291 - DNA, 20 bp, Artificial Sequence
  Synthetic polynucleotide
tggaaggccaggcaggtgga

SEQ ID NO: 8292 - DNA, 20 bp, Artificial Sequence
  Synthetic polynucleotide
tcacggctcagacggcttca

SEQ ID NO: 8293 - DNA, 20 bp, Artificial Sequence
  Synthetic polynucleotide
atcatggaaccagcagcaca

SEQ ID NO: 8294 - DNA, 20 bp, Artificial Sequence
  Synthetic polynucleotide
atgagggacactatatgatg

SEQ ID NO: 8295 - DNA, 20 bp, Artificial Sequence
  Synthetic polynucleotide
aagggacatagaaaatcaaa

SEQ ID NO: 8296 - DNA, 20 bp, Artificial Sequence
  Synthetic polynucleotide
aagtacgtggacaagctacg

SEQ ID NO: 8297 - DNA, 20 bp, Artificial Sequence
  Synthetic polynucleotide
gcggcaggtgcggctgcagc

SEQ ID NO: 8298 - DNA, 20 bp, Artificial Sequence
  Synthetic polynucleotide
gaaagggccttcctgaggaa

SEQ ID NO: 8299 - DNA, 20 bp, Artificial Sequence
  Synthetic polynucleotide
acagggtgctcacggccatg

SEQ ID NO: 8300 - DNA, 20 bp, Artificial Sequence
  Synthetic polynucleotide
aagggctgggaggcaagggc

SEQ ID NO: 8301 - DNA, 20 bp, Artificial Sequence
  Synthetic polynucleotide
cctttggcacagcggcacag

SEQ ID NO: 8302 - DNA, 20 bp, Artificial Sequence
  Synthetic polynucleotide
ttgttgcagatacatctatc

SEQ ID NO: 8303 - DNA, 20 bp, Artificial Sequence
  Synthetic polynucleotide
gtgcgaggtcggcatgaggt

SEQ ID NO: 8304 - DNA, 20 bp, Artificial Sequence
  Synthetic polynucleotide
aggtgcggctgcagcaggtg

SEQ ID NO: 8305 - DNA, 20 bp, Artificial Sequence
  Synthetic polynucleotide
gcggcgggctcgggctgcgg

SEQ ID NO: 8306 - DNA, 20 bp, Artificial Sequence
  Synthetic polynucleotide
cgaatgctataatgagtagt

SEQ ID NO: 8307 - DNA, 20 bp, Artificial Sequence
  Synthetic polynucleotide
ctgtagtcgtgggcagtcgt

SEQ ID NO: 8308 - DNA, 20 bp, Artificial Sequence
  Synthetic polynucleotide
aggcgggggtgcggccgggg

SEQ ID NO: 8309 - DNA, 20 bp, Artificial Sequence
  Synthetic polynucleotide
tgaagacaaaaggaggatca

SEQ ID NO: 8310 - DNA, 20 bp, Artificial Sequence
  Synthetic polynucleotide
actggatcacagggatcaca

SEQ ID NO: 8311 - DNA, 20 bp, Artificial Sequence
  Synthetic polynucleotide
ttggcagtggtggcatgagg

SEQ ID NO: 8312 - DNA, 20 bp, Artificial Sequence
  Synthetic polynucleotide
aggtgggggctggggcgtgg

SEQ ID NO: 8313 - DNA, 20 bp, Artificial Sequence
  Synthetic polynucleotide
tatgacccaggaagccgagc

SEQ ID NO: 8314 - DNA, 20 bp, Artificial Sequence
  Synthetic polynucleotide
aaacgggtcgccatcgacaa

SEQ ID NO: 8315 - DNA, 20 bp, Artificial Sequence
  Synthetic polynucleotide
attaggtgggcttagatttg

SEQ ID NO: 8316 - DNA, 20 bp, Artificial Sequence
  Synthetic polynucleotide
agactgctcagggctactca

SEQ ID NO: 8317 - DNA, 20 bp, Artificial Sequence
  Synthetic polynucleotide
caccagtgtgggcttcgtgt

SEQ ID NO: 8318 - DNA, 20 bp, Artificial Sequence
  Synthetic polynucleotide
gcctcggcctctcggcctct

SEQ ID NO: 8319 - DNA, 20 bp, Artificial Sequence
  Synthetic polynucleotide
acgcggtggaggcagggtgg

SEQ ID NO: 8320 - DNA, 20 bp, Artificial Sequence
  Synthetic polynucleotide
gcatctacaactggggcaac

SEQ ID NO: 8321 - DNA, 20 bp, Artificial Sequence
  Synthetic polynucleotide
atcagaaggggtaatccaga

SEQ ID NO: 8322 - DNA, 20 bp, Artificial Sequence
  Synthetic polynucleotide
tcgaactcccgcaccagacc

SEQ ID NO: 8323 - DNA, 20 bp, Artificial Sequence
  Synthetic polynucleotide
tcaaaagacaaggttactta

SEQ ID NO: 8324 - DNA, 20 bp, Artificial Sequence
  Synthetic polynucleotide
gtgcggccagtggaagaccg

SEQ ID NO: 8325 - DNA, 20 bp, Artificial Sequence
  Synthetic polynucleotide
gctggatattcgggatattc

SEQ ID NO: 8326 - DNA, 20 bp, Artificial Sequence
  Synthetic polynucleotide
gacggtgaagacggttaaga

SEQ ID NO: 8327 - DNA, 20 bp, Artificial Sequence
  Synthetic polynucleotide
gcaggagactactggactac

SEQ ID NO: 8328 - DNA, 20 bp, Artificial Sequence
  Synthetic polynucleotide
gacatcatgtgcggggatgc

SEQ ID NO: 8329 - DNA, 20 bp, Artificial Sequence
  Synthetic polynucleotide
tgggcaaggtgtggcgggca

SEQ ID NO: 8330 - DNA, 20 bp, Artificial Sequence
  Synthetic polynucleotide
agcatctggaacaacagaac

SEQ ID NO: 8331 - DNA, 20 bp, Artificial Sequence
  Synthetic polynucleotide
cagatggcctccaggcctcc

SEQ ID NO: 8332 - DNA, 20 bp, Artificial Sequence
  Synthetic polynucleotide
cggcgggcgcagccggtcgg

SEQ ID NO: 8333 - DNA, 20 bp, Artificial Sequence
  Synthetic polynucleotide
ccggggcactgcagctaccg

SEQ ID NO: 8334 - DNA, 20 bp, Artificial Sequence
  Synthetic polynucleotide
tgtaaatgggggtgtaaatg

SEQ ID NO: 8335 - DNA, 20 bp, Artificial Sequence
  Synthetic polynucleotide
aacgggtcgccatcgacaac

SEQ ID NO: 8336 - DNA, 20 bp, Artificial Sequence
  Synthetic polynucleotide
ggcggagctgctggagctgc

SEQ ID NO: 8337 - DNA, 20 bp, Artificial Sequence
  Synthetic polynucleotide
cgggatgaagaaggcgaaga

SEQ ID NO: 8338 - DNA, 20 bp, Artificial Sequence
  Synthetic polynucleotide
aagggtcgaggtaagggaaa

SEQ ID NO: 8339 - DNA, 20 bp, Artificial Sequence
  Synthetic polynucleotide
acagggctcgtccaactaac

SEQ ID NO: 8340 - DNA, 20 bp, Artificial Sequence
  Synthetic polynucleotide
cagatggccagctggccagc

SEQ ID NO: 8341 - DNA, 20 bp, Artificial Sequence
  Synthetic polynucleotide
cagggtgctcacggccatgc

SEQ ID NO: 8342 - DNA, 20 bp, Artificial Sequence
  Synthetic polynucleotide
aggaccgggagcaccaggac

SEQ ID NO: 8343 - DNA, 20 bp, Artificial Sequence
  Synthetic polynucleotide
tcaagttcttaggtattctt

SEQ ID NO: 8344 - DNA, 20 bp, Artificial Sequence
  Synthetic polynucleotide
cctgttctgaaggcaggtga

SEQ ID NO: 8345 - DNA, 20 bp, Artificial Sequence
  Synthetic polynucleotide
cgcgaggctgggccgtcgcg

SEQ ID NO: 8346 - DNA, 20 bp, Artificial Sequence
  Synthetic polynucleotide
tcgtaatcgctggtaatcgc

SEQ ID NO: 8347 - DNA, 20 bp, Artificial Sequence
  Synthetic polynucleotide
agagctcctcggacgctcct

SEQ ID NO: 8348 - DNA, 20 bp, Artificial Sequence
  Synthetic polynucleotide
actccccggctttcggcttt

SEQ ID NO: 8349 - DNA, 20 bp, Artificial Sequence
  Synthetic polynucleotide
gacaggatggtgaacaggga

SEQ ID NO: 8350 - DNA, 20 bp, Artificial Sequence
  Synthetic polynucleotide
cgtggtctcggtcattggcg

SEQ ID NO: 8351 - DNA, 20 bp, Artificial Sequence
  Synthetic polynucleotide
tgctggcacctgagccgtgc

SEQ ID NO: 8352 - DNA, 20 bp, Artificial Sequence
  Synthetic polynucleotide
ctcaactccggcatcggcat

SEQ ID NO: 8353 - DNA, 20 bp, Artificial Sequence
  Synthetic polynucleotide
cgcgggcgtcctgctcgccg

SEQ ID NO: 8354 - DNA, 20 bp, Artificial Sequence
  Synthetic polynucleotide
aattcccagcaacaggcaac

SEQ ID NO: 8355 - DNA, 20 bp, Artificial Sequence
  Synthetic polynucleotide
atggaggggccggactggag

SEQ ID NO: 8356 - DNA, 20 bp, Artificial Sequence
  Synthetic polynucleotide
cagcagaccagggccccacc

SEQ ID NO: 8357 - DNA, 20 bp, Artificial Sequence
  Synthetic polynucleotide
gcgggcgtcctgctcgccgc

SEQ ID NO: 8358 - DNA, 20 bp, Artificial Sequence
  Synthetic polynucleotide
ccctgctgctggccagctgc

SEQ ID NO: 8359 - DNA, 20 bp, Artificial Sequence
  Synthetic polynucleotide
gctgaacattggctgaacat

SEQ ID NO: 8360 - DNA, 20 bp, Artificial Sequence
  Synthetic polynucleotide
atgaagcccacagggactca

SEQ ID NO: 8361 - DNA, 20 bp, Artificial Sequence
  Synthetic polynucleotide
tagagtgtcccatctgcatc

SEQ ID NO: 8362 - DNA, 20 bp, Artificial Sequence
  Synthetic polynucleotide
gattcactttcttcctgcct

SEQ ID NO: 8363 - DNA, 20 bp, Artificial Sequence
  Synthetic polynucleotide
attttatgggctaggtcggt

SEQ ID NO: 8364 - DNA, 20 bp, Artificial Sequence
  Synthetic polynucleotide
cctattattgggaatgggaa

SEQ ID NO: 8365 - DNA, 20 bp, Artificial Sequence
  Synthetic polynucleotide
gctgtagtcgtgggcagtcg

SEQ ID NO: 8366 - DNA, 20 bp, Artificial Sequence
  Synthetic polynucleotide
aggacaaatctgacactgca

SEQ ID NO: 8367 - DNA, 20 bp, Artificial Sequence
  Synthetic polynucleotide
caataaaagctgaggtgctg

SEQ ID NO: 8368 - DNA, 20 bp, Artificial Sequence
  Synthetic polynucleotide
ttgcaggggaagaacagaac

SEQ ID NO: 8369 - DNA, 20 bp, Artificial Sequence
  Synthetic polynucleotide
agcacagtagaactaagtaa

SEQ ID NO: 8370 - DNA, 20 bp, Artificial Sequence
  Synthetic polynucleotide
atggctgtggagtcctgcct

SEQ ID NO: 8371 - DNA, 20 bp, Artificial Sequence
  Synthetic polynucleotide
gcaccaggaactcggcttct

SEQ ID NO: 8372 - DNA, 20 bp, Artificial Sequence
  Synthetic polynucleotide
acagggggactccgggactc

SEQ ID NO: 8373 - DNA, 20 bp, Artificial Sequence
  Synthetic polynucleotide
ccaagctggcactggtgagc

SEQ ID NO: 8374 - DNA, 20 bp, Artificial Sequence
  Synthetic polynucleotide
catgaagggctgggaggcaa

SEQ ID NO: 8375 - DNA, 20 bp, Artificial Sequence
  Synthetic polynucleotide
tacgcttggtatgttatcct

SEQ ID NO: 8376 - DNA, 20 bp, Artificial Sequence
  Synthetic polynucleotide
cactgtcgatggctgcacga

SEQ ID NO: 8377 - DNA, 20 bp, Artificial Sequence
  Synthetic polynucleotide
tgctgagcagtgtggaagtg

SEQ ID NO: 8378 - DNA, 20 bp, Artificial Sequence
  Synthetic polynucleotide
tgcactcaaagggcactcaa

SEQ ID NO: 8379 - DNA, 20 bp, Artificial Sequence
  Synthetic polynucleotide
gatacatcccagactagact

SEQ ID NO: 8380 - DNA, 20 bp, Artificial Sequence
  Synthetic polynucleotide
gtgggtgctgagggtgccga

SEQ ID NO: 8381 - DNA, 20 bp, Artificial Sequence
  Synthetic polynucleotide
cgaagctcaaggtggagaca

SEQ ID NO: 8382 - DNA, 20 bp, Artificial Sequence
  Synthetic polynucleotide
atatcagtctgtgggactgt

SEQ ID NO: 8383 - DNA, 20 bp, Artificial Sequence
  Synthetic polynucleotide
ctgtgtgttaacactagcta

SEQ ID NO: 8384 - DNA, 20 bp, Artificial Sequence
  Synthetic polynucleotide
cgctgtccgaggagcgtccg

SEQ ID NO: 8385 - DNA, 20 bp, Artificial Sequence
  Synthetic polynucleotide
gccagtgtggaagaacagtg

SEQ ID NO: 8386 - DNA, 20 bp, Artificial Sequence
  Synthetic polynucleotide
gcttctgtgctcctggctcc

SEQ ID NO: 8387 - DNA, 20 bp, Artificial Sequence
  Synthetic polynucleotide
agacaaaaggaggatcaagg

SEQ ID NO: 8388 - DNA, 20 bp, Artificial Sequence
  Synthetic polynucleotide
cgcgcctggccccggggccc

SEQ ID NO: 8389 - DNA, 20 bp, Artificial Sequence
  Synthetic polynucleotide
aactcaggttcggttttaat

SEQ ID NO: 8390 - DNA, 20 bp, Artificial Sequence
  Synthetic polynucleotide
aacagaaaaaagagggaaag

SEQ ID NO: 8391 - DNA, 20 bp, Artificial Sequence
  Synthetic polynucleotide
cgccggccgcacccccgcct

SEQ ID NO: 8392 - DNA, 20 bp, Artificial Sequence
  Synthetic polynucleotide
agccttgactgttgagcagc

SEQ ID NO: 8393 - DNA, 20 bp, Artificial Sequence
  Synthetic polynucleotide
ccccccgaggagccaccccg

SEQ ID NO: 8394 - DNA, 20 bp, Artificial Sequence
  Synthetic polynucleotide
ttcaccgtcaccgtccgtcc

SEQ ID NO: 8395 - DNA, 20 bp, Artificial Sequence
  Synthetic polynucleotide
cgcaagatggaggtgggagg

SEQ ID NO: 8396 - DNA, 20 bp, Artificial Sequence
  Synthetic polynucleotide
ttgccgggttcgcctcccgg

SEQ ID NO: 8397 - DNA, 20 bp, Artificial Sequence
  Synthetic polynucleotide
tccgggctaaagaagccccc

SEQ ID NO: 8398 - DNA, 20 bp, Artificial Sequence
  Synthetic polynucleotide
agatgagaaggggaggagaa

SEQ ID NO: 8399 - DNA, 20 bp, Artificial Sequence
  Synthetic polynucleotide
atcagtggggcgctggagtg

SEQ ID NO: 8400 - DNA, 20 bp, Artificial Sequence
  Synthetic polynucleotide
cattgggacaaagtatccat

SEQ ID NO: 8401 - DNA, 20 bp, Artificial Sequence
  Synthetic polynucleotide
ccataacagcatcaggagtc

SEQ ID NO: 8402 - DNA, 20 bp, Artificial Sequence
  Synthetic polynucleotide
ttggtgcatgaggatgcatg

SEQ ID NO: 8403 - DNA, 20 bp, Artificial Sequence
  Synthetic polynucleotide
atgtatatgcaactggttgg

SEQ ID NO: 8404 - DNA, 20 bp, Artificial Sequence
  Synthetic polynucleotide
accacaggtgagcaccgacc

SEQ ID NO: 8405 - DNA, 20 bp, Artificial Sequence
  Synthetic polynucleotide
ggtgatcaaacgccccgccc

SEQ ID NO: 8406 - DNA, 20 bp, Artificial Sequence
  Synthetic polynucleotide
agcagctgacagagggttag

SEQ ID NO: 8407 - DNA, 20 bp, Artificial Sequence
  Synthetic polynucleotide
tcccccagaaaaaggtgcaa

SEQ ID NO: 8408 - DNA, 20 bp, Artificial Sequence
  Synthetic polynucleotide
ctgcaattgaggcaaaattg

SEQ ID NO: 8409 - DNA, 20 bp, Artificial Sequence
  Synthetic polynucleotide
gctggagatctcggaggcat

SEQ ID NO: 8410 - DNA, 20 bp, Artificial Sequence
  Synthetic polynucleotide
ggctgccttcgggccgcctt

SEQ ID NO: 8411 - DNA, 20 bp, Artificial Sequence
  Synthetic polynucleotide
ctgaaggggaaggctcgaag

SEQ ID NO: 8412 - DNA, 20 bp, Artificial Sequence
  Synthetic polynucleotide
ctgctccacagggttcattc

SEQ ID NO: 8413 - DNA, 20 bp, Artificial Sequence
  Synthetic polynucleotide
catgggcatgcagggcatgc

SEQ ID NO: 8414 - DNA, 20 bp, Artificial Sequence
  Synthetic polynucleotide
gtctccagccttgtctgtct

SEQ ID NO: 8415 - DNA, 20 bp, Artificial Sequence
  Synthetic polynucleotide
acactggatatttgagccac

SEQ ID NO: 8416 - DNA, 20 bp, Artificial Sequence
  Synthetic polynucleotide
gccaggtagcccaggttggt

SEQ ID NO: 8417 - DNA, 20 bp, Artificial Sequence
  Synthetic polynucleotide
cagagttccacacggcatca

SEQ ID NO: 8418 - DNA, 20 bp, Artificial Sequence
  Synthetic polynucleotide
cacccgcggggagacggtgt

SEQ ID NO: 8419 - DNA, 20 bp, Artificial Sequence
  Synthetic polynucleotide
ggtcggcgggcgcagccggt

SEQ ID NO: 8420 - DNA, 20 bp, Artificial Sequence
  Synthetic polynucleotide
cagcttgatgaggtcagatg

SEQ ID NO: 8421 - DNA, 20 bp, Artificial Sequence
  Synthetic polynucleotide
tcaggaggagacgtctcagg

SEQ ID NO: 8422 - DNA, 20 bp, Artificial Sequence
  Synthetic polynucleotide
cggggctggcgcggctggcg

SEQ ID NO: 8423 - DNA, 20 bp, Artificial Sequence
  Synthetic polynucleotide
gcggtgcatgggctgcgcat

SEQ ID NO: 8424 - DNA, 20 bp, Artificial Sequence
  Synthetic polynucleotide
cgcggagcctcgcaggggca

SEQ ID NO: 8425 - DNA, 20 bp, Artificial Sequence
  Synthetic polynucleotide
cacagaaacatgtacagtac

SEQ ID NO: 8426 - DNA, 20 bp, Artificial Sequence
  Synthetic polynucleotide
gcccaaggtggccaagccca

SEQ ID NO: 8427 - DNA, 20 bp, Artificial Sequence
  Synthetic polynucleotide
ggcagtggtggcatgagggg

SEQ ID NO: 8428 - DNA, 20 bp, Artificial Sequence
  Synthetic polynucleotide
acgctcatagagtaactaac

SEQ ID NO: 8429 - DNA, 20 bp, Artificial Sequence
  Synthetic polynucleotide
gcggtccgggactgcggtcc

SEQ ID NO: 8430 - DNA, 20 bp, Artificial Sequence
  Synthetic polynucleotide
agaccgagttcctatggatg

SEQ ID NO: 8431 - DNA, 20 bp, Artificial Sequence
  Synthetic polynucleotide
tgtgctcactctgccaggcc

SEQ ID NO: 8432 - DNA, 20 bp, Artificial Sequence
  Synthetic polynucleotide
cttatggcagaattggccat

SEQ ID NO: 8433 - DNA, 20 bp, Artificial Sequence
  Synthetic polynucleotide
gcagaccctccgagcagagc

SEQ ID NO: 8434 - DNA, 20 bp, Artificial Sequence
  Synthetic polynucleotide
ggcggtggcggtgccggtgc

SEQ ID NO: 8435 - DNA, 20 bp, Artificial Sequence
  Synthetic polynucleotide
cgggagacggggctggagac

SEQ ID NO: 8436 - DNA, 20 bp, Artificial Sequence
  Synthetic polynucleotide
gacacaggcgtcgctgacac

SEQ ID NO: 8437 - DNA, 20 bp, Artificial Sequence
  Synthetic polynucleotide
ggagatctcggaggcatcgg

SEQ ID NO: 8438 - DNA, 20 bp, Artificial Sequence
  Synthetic polynucleotide
gggaacgtcagttaggagtt

SEQ ID NO: 8439 - DNA, 20 bp, Artificial Sequence
  Synthetic polynucleotide
cgtgggcctgtacacgtccg

SEQ ID NO: 8440 - DNA, 20 bp, Artificial Sequence
  Synthetic polynucleotide
actacgtggactgtggactg

SEQ ID NO: 8441 - DNA, 20 bp, Artificial Sequence
  Synthetic polynucleotide
acggctgtggagctgacctg

SEQ ID NO: 8442 - DNA, 20 bp, Artificial Sequence
  Synthetic polynucleotide
ctgtccctggcttttatccc

SEQ ID NO: 8443 - DNA, 20 bp, Artificial Sequence
  Synthetic polynucleotide
gcgctttatgcggatctatc

SEQ ID NO: 8444 - DNA, 20 bp, Artificial Sequence
  Synthetic polynucleotide
ttgccaaagctgttagggtt

SEQ ID NO: 8445 - DNA, 20 bp, Artificial Sequence
  Synthetic polynucleotide
caaggacgcctaccatgcat

SEQ ID NO: 8446 - DNA, 20 bp, Artificial Sequence
  Synthetic polynucleotide
ggggatgcaggtggagctgt

SEQ ID NO: 8447 - DNA, 20 bp, Artificial Sequence
  Synthetic polynucleotide
gctgcagacggagctgcaga

SEQ ID NO: 8448 - DNA, 20 bp, Artificial Sequence
  Synthetic polynucleotide
ggagccatccagcaggaagc

SEQ ID NO: 8449 - DNA, 20 bp, Artificial Sequence
  Synthetic polynucleotide
caaccacctccagcctggcc

SEQ ID NO: 8450 - DNA, 20 bp, Artificial Sequence
  Synthetic polynucleotide
aggcagcatacgcgacgcga

SEQ ID NO: 8451 - DNA, 20 bp, Artificial Sequence
  Synthetic polynucleotide
ctaagcaacatgagcttagc

SEQ ID NO: 8452 - DNA, 20 bp, Artificial Sequence
  Synthetic polynucleotide
ccgggaaggggcatgggaag

SEQ ID NO: 8453 - DNA, 20 bp, Artificial Sequence
  Synthetic polynucleotide
acagcttcagcgagccgagc

SEQ ID NO: 8454 - DNA, 20 bp, Artificial Sequence
  Synthetic polynucleotide
atgggagcagcaggtgtcga

SEQ ID NO: 8455 - DNA, 20 bp, Artificial Sequence
  Synthetic polynucleotide
gagctggggtccaggattcc

SEQ ID NO: 8456 - DNA, 20 bp, Artificial Sequence
  Synthetic polynucleotide
tcaacgcggcgctcggcgct

SEQ ID NO: 8457 - DNA, 20 bp, Artificial Sequence
  Synthetic polynucleotide
cgccgctaccggctcgccac

SEQ ID NO: 8458 - DNA, 20 bp, Artificial Sequence
  Synthetic polynucleotide
catatcagtctgtgggactg

SEQ ID NO: 8459 - DNA, 20 bp, Artificial Sequence
  Synthetic polynucleotide
cccctggagaccagcatcat

SEQ ID NO: 8460 - DNA, 20 bp, Artificial Sequence
  Synthetic polynucleotide
atcagggccagctggccagc

SEQ ID NO: 8461 - DNA, 20 bp, Artificial Sequence
  Synthetic polynucleotide
ccccggacggtgacggcgga

SEQ ID NO: 8462 - DNA, 20 bp, Artificial Sequence
  Synthetic polynucleotide
ctgcagaacattgggaacat

SEQ ID NO: 8463 - DNA, 20 bp, Artificial Sequence
  Synthetic polynucleotide
tgcccctactgcgaccgacc

SEQ ID NO: 8464 - DNA, 20 bp, Artificial Sequence
  Synthetic polynucleotide
cttcgtgggcaaggtgtggc

SEQ ID NO: 8465 - DNA, 20 bp, Artificial Sequence
  Synthetic polynucleotide
ggccttccgctacagacaga

SEQ ID NO: 8466 - DNA, 20 bp, Artificial Sequence
  Synthetic polynucleotide
ctgagaaggttgccccgaga

SEQ ID NO: 8467 - DNA, 20 bp, Artificial Sequence
  Synthetic polynucleotide
tcagaaggggtaatccagaa

SEQ ID NO: 8468 - DNA, 20 bp, Artificial Sequence
  Synthetic polynucleotide
acgttgccaaagtagtcagt

SEQ ID NO: 8469 - DNA, 20 bp, Artificial Sequence
  Synthetic polynucleotide
gggtcagcctggaggcctgg

SEQ ID NO: 8470 - DNA, 20 bp, Artificial Sequence
  Synthetic polynucleotide
tgacccggtagtagggtagt

SEQ ID NO: 8471 - DNA, 20 bp, Artificial Sequence
  Synthetic polynucleotide
atcatggtgacacttactta

SEQ ID NO: 8472 - DNA, 20 bp, Artificial Sequence
  Synthetic polynucleotide
ggcctttgctgtggttgggt

SEQ ID NO: 8473 - DNA, 20 bp, Artificial Sequence
  Synthetic polynucleotide
ctggacaaggctgggctccc

SEQ ID NO: 8474 - DNA, 20 bp, Artificial Sequence
  Synthetic polynucleotide
aggtgttgaatggaattgaa

SEQ ID NO: 8475 - DNA, 20 bp, Artificial Sequence
  Synthetic polynucleotide
ctcttcttggatgatgactc

SEQ ID NO: 8476 - DNA, 20 bp, Artificial Sequence
  Synthetic polynucleotide
tgtccttttgctccaggcag

SEQ ID NO: 8477 - DNA, 20 bp, Artificial Sequence
  Synthetic polynucleotide
gggttccttctgaatgatga

SEQ ID NO: 8478 - DNA, 20 bp, Artificial Sequence
  Synthetic polynucleotide
tggaggtgcggaagcggaag

SEQ ID NO: 8479 - DNA, 20 bp, Artificial Sequence
  Synthetic polynucleotide
agtgaagatgacaatcatgt

SEQ ID NO: 8480 - DNA, 20 bp, Artificial Sequence
  Synthetic polynucleotide
taccagcccgacgagggacg

SEQ ID NO: 8481 - DNA, 20 bp, Artificial Sequence
  Synthetic polynucleotide
ccagttccagaagggcaata

SEQ ID NO: 8482 - DNA, 20 bp, Artificial Sequence
  Synthetic polynucleotide
atctaactgaagaggctttg

SEQ ID NO: 8483 - DNA, 20 bp, Artificial Sequence
  Synthetic polynucleotide
gcggacctcgggggcggcag

SEQ ID NO: 8484 - DNA, 20 bp, Artificial Sequence
  Synthetic polynucleotide
tggacgtagtcgccatgcca

SEQ ID NO: 8485 - DNA, 20 bp, Artificial Sequence
  Synthetic polynucleotide
actcacgtccatgtagtagt

SEQ ID NO: 8486 - DNA, 20 bp, Artificial Sequence
  Synthetic polynucleotide
agttggtccttctcggtcct

SEQ ID NO: 8487 - DNA, 20 bp, Artificial Sequence
  Synthetic polynucleotide
attggaggcctgactcactc

SEQ ID NO: 8488 - DNA, 20 bp, Artificial Sequence
  Synthetic polynucleotide
ggcggccggaagggcgcggc

SEQ ID NO: 8489 - DNA, 20 bp, Artificial Sequence
  Synthetic polynucleotide
ggccgaggacttgccgcaga

SEQ ID NO: 8490 - DNA, 20 bp, Artificial Sequence
  Synthetic polynucleotide
ggtggtcctgccggaggcgg

SEQ ID NO: 8491 - DNA, 20 bp, Artificial Sequence
  Synthetic polynucleotide
cccatgacctatactcactc

SEQ ID NO: 8492 - DNA, 20 bp, Artificial Sequence
  Synthetic polynucleotide
ttgtccttgcagtcggcagt

SEQ ID NO: 8493 - DNA, 20 bp, Artificial Sequence
  Synthetic polynucleotide
gtgggcctgtacacgtccgt

SEQ ID NO: 8494 - DNA, 20 bp, Artificial Sequence
  Synthetic polynucleotide
caccaaggaaaggagcacca

SEQ ID NO: 8495 - DNA, 20 bp, Artificial Sequence
  Synthetic polynucleotide
tgttgggctttagcattagc

SEQ ID NO: 8496 - DNA, 20 bp, Artificial Sequence
  Synthetic polynucleotide
tacatttgcttgggagtcat

SEQ ID NO: 8497 - DNA, 20 bp, Artificial Sequence
  Synthetic polynucleotide
aaggtgaagcagcatctatc

SEQ ID NO: 8498 - DNA, 20 bp, Artificial Sequence
  Synthetic polynucleotide
agggcaggcatgcactgcac

SEQ ID NO: 8499 - DNA, 20 bp, Artificial Sequence
  Synthetic polynucleotide
ggttgggatggggctggatg

SEQ ID NO: 8500 - DNA, 20 bp, Artificial Sequence
  Synthetic polynucleotide
cacggcagcgggccctcagc

SEQ ID NO: 8501 - DNA, 20 bp, Artificial Sequence
  Synthetic polynucleotide
ctgcgctgtggacactgctg

SEQ ID NO: 8502 - DNA, 20 bp, Artificial Sequence
  Synthetic polynucleotide
aagctggaactctgggactc

SEQ ID NO: 8503 - DNA, 20 bp, Artificial Sequence
  Synthetic polynucleotide
ggatgtcatctgtggatctg

SEQ ID NO: 8504 - DNA, 20 bp, Artificial Sequence
  Synthetic polynucleotide
gcggaactgggggcggaact

SEQ ID NO: 8505 - DNA, 20 bp, Artificial Sequence
  Synthetic polynucleotide
tcggctggtgctgcctcggc

SEQ ID NO: 8506 - DNA, 20 bp, Artificial Sequence
  Synthetic polynucleotide
tccagcctggagtcccaggc

SEQ ID NO: 8507 - DNA, 20 bp, Artificial Sequence
  Synthetic polynucleotide
cggaggcgggggtgcggccg

SEQ ID NO: 8508 - DNA, 20 bp, Artificial Sequence
  Synthetic polynucleotide
cttgtccgtgcgcctgcctg

SEQ ID NO: 8509 - DNA, 20 bp, Artificial Sequence
  Synthetic polynucleotide
cgtcgccccggggccgcccc

SEQ ID NO: 8510 - DNA, 20 bp, Artificial Sequence
  Synthetic polynucleotide
ctgcgctgagggcccgctga

SEQ ID NO: 8511 - DNA, 20 bp, Artificial Sequence
  Synthetic polynucleotide
gagtcgtcggtgcggtggtg

SEQ ID NO: 8512 - DNA, 20 bp, Artificial Sequence
  Synthetic polynucleotide
tgctgcggacgccgggacgc

SEQ ID NO: 8513 - DNA, 20 bp, Artificial Sequence
  Synthetic polynucleotide
gcccctgcccctgctgactg

SEQ ID NO: 8514 - DNA, 20 bp, Artificial Sequence
  Synthetic polynucleotide
ctttgtggtggacatgatga

SEQ ID NO: 8515 - DNA, 20 bp, Artificial Sequence
  Synthetic polynucleotide
ttgctggtgaagtggttaag

SEQ ID NO: 8516 - DNA, 20 bp, Artificial Sequence
  Synthetic polynucleotide
cgctcccggtgccccgctcc

SEQ ID NO: 8517 - DNA, 20 bp, Artificial Sequence
  Synthetic polynucleotide
ggtgctcacggccatggcca

SEQ ID NO: 8518 - DNA, 20 bp, Artificial Sequence
  Synthetic polynucleotide
ggcaactgcagcccggacgg

SEQ ID NO: 8519 - DNA, 20 bp, Artificial Sequence
  Synthetic polynucleotide
tctctgcctgcaggatgagc

SEQ ID NO: 8520 - DNA, 20 bp, Artificial Sequence
  Synthetic polynucleotide
ggcggaactgggggcggaac

SEQ ID NO: 8521 - DNA, 20 bp, Artificial Sequence
  Synthetic polynucleotide
ggcctcggctggtgctgcct

SEQ ID NO: 8522 - DNA, 20 bp, Artificial Sequence
  Synthetic polynucleotide
tgggtttgaaggatgcgatg

SEQ ID NO: 8523 - DNA, 20 bp, Artificial Sequence
  Synthetic polynucleotide
tagtggccatgcacgtcacg

SEQ ID NO: 8524 - DNA, 20 bp, Artificial Sequence
  Synthetic polynucleotide
agcagaccagggccccacca

SEQ ID NO: 8525 - DNA, 20 bp, Artificial Sequence
  Synthetic polynucleotide
gcaggctgacgagtgcctgc

SEQ ID NO: 8526 - DNA, 20 bp, Artificial Sequence
  Synthetic polynucleotide
cagccatttcgaaaggcagg

SEQ ID NO: 8527 - DNA, 20 bp, Artificial Sequence
  Synthetic polynucleotide
gagggtcggcctcagctttt

SEQ ID NO: 8528 - DNA, 20 bp, Artificial Sequence
  Synthetic polynucleotide
gcattgcacaggtattgcac

SEQ ID NO: 8529 - DNA, 20 bp, Artificial Sequence
  Synthetic polynucleotide
agcggctggcggctggcggc

SEQ ID NO: 8530 - DNA, 20 bp, Artificial Sequence
  Synthetic polynucleotide
cgggcagggccacacgcgcc

SEQ ID NO: 8531 - DNA, 20 bp, Artificial Sequence
  Synthetic polynucleotide
cagaggcagtgtggacagtg

SEQ ID NO: 8532 - DNA, 20 bp, Artificial Sequence
  Synthetic polynucleotide
cccaggagtgaactggtgtc

SEQ ID NO: 8533 - DNA, 20 bp, Artificial Sequence
  Synthetic polynucleotide
gtcgccccggggccgccccg

SEQ ID NO: 8534 - DNA, 20 bp, Artificial Sequence
  Synthetic polynucleotide
tttggaagatgagccacctt

SEQ ID NO: 8535 - DNA, 20 bp, Artificial Sequence
  Synthetic polynucleotide
aggacaagcagattcattca

SEQ ID NO: 8536 - DNA, 20 bp, Artificial Sequence
  Synthetic polynucleotide
tgtggctcctgcggctcctg

SEQ ID NO: 8537 - DNA, 20 bp, Artificial Sequence
  Synthetic polynucleotide
gcaggacaacagatggctga

SEQ ID NO: 8538 - DNA, 20 bp, Artificial Sequence
  Synthetic polynucleotide
aatggtcttgtgaagggtga

SEQ ID NO: 8539 - DNA, 20 bp, Artificial Sequence
  Synthetic polynucleotide
gactgcaaggacagactgca

SEQ ID NO: 8540 - DNA, 20 bp, Artificial Sequence
  Synthetic polynucleotide
agctggctgggaacaccagc

SEQ ID NO: 8541 - DNA, 20 bp, Artificial Sequence
  Synthetic polynucleotide
ccggcggtggggcggtgggg

SEQ ID NO: 8542 - DNA, 20 bp, Artificial Sequence
  Synthetic polynucleotide
caagaccgaacactacttac

SEQ ID NO: 8543 - DNA, 20 bp, Artificial Sequence
  Synthetic polynucleotide
agatccaggcctgtggcatg

SEQ ID NO: 8544 - DNA, 20 bp, Artificial Sequence
  Synthetic polynucleotide
acccgcggggagacggtgtg

SEQ ID NO: 8545 - DNA, 20 bp, Artificial Sequence
  Synthetic polynucleotide
tcggcataagtggaccgacc

SEQ ID NO: 8546 - DNA, 20 bp, Artificial Sequence
  Synthetic polynucleotide
agccgtgctcgtggtgctcg

SEQ ID NO: 8547 - DNA, 20 bp, Artificial Sequence
  Synthetic polynucleotide
cctccggatggttttggttt

SEQ ID NO: 8548 - DNA, 20 bp, Artificial Sequence
  Synthetic polynucleotide
ggtcggcggccccggggcga

SEQ ID NO: 8549 - DNA, 20 bp, Artificial Sequence
  Synthetic polynucleotide
acacctggaaaggtcaggtc

SEQ ID NO: 8550 - DNA, 20 bp, Artificial Sequence
  Synthetic polynucleotide
tctcccagaggaagttatag

SEQ ID NO: 8551 - DNA, 20 bp, Artificial Sequence
  Synthetic polynucleotide
tacaccgaggacgtggggtg

SEQ ID NO: 8552 - DNA, 20 bp, Artificial Sequence
  Synthetic polynucleotide
gtgatccggagatcggagat

SEQ ID NO: 8553 - DNA, 20 bp, Artificial Sequence
  Synthetic polynucleotide
gcggtgcggcggccgcgcgg

SEQ ID NO: 8554 - DNA, 20 bp, Artificial Sequence
  Synthetic polynucleotide
tgtggacctgaagccttcct

SEQ ID NO: 8555 - DNA, 20 bp, Artificial Sequence
  Synthetic polynucleotide
ggcccggggaccaggggacc

SEQ ID NO: 8556 - DNA, 20 bp, Artificial Sequence
  Synthetic polynucleotide
aaggtcagctggtagcgtag

SEQ ID NO: 8557 - DNA, 20 bp, Artificial Sequence
  Synthetic polynucleotide
gaccgcaagatggaggtggg

SEQ ID NO: 8558 - DNA, 20 bp, Artificial Sequence
  Synthetic polynucleotide
gctgggatgctgggccccgc

SEQ ID NO: 8559 - DNA, 20 bp, Artificial Sequence
  Synthetic polynucleotide
gcctcgatgtcgtcggccgt

SEQ ID NO: 8560 - DNA, 20 bp, Artificial Sequence
  Synthetic polynucleotide
ggccgtagtacatgacatga

SEQ ID NO: 8561 - DNA, 20 bp, Artificial Sequence
  Synthetic polynucleotide
gtgctcactctgccaggcca

SEQ ID NO: 8562 - DNA, 20 bp, Artificial Sequence
  Synthetic polynucleotide
gctagtatggaggatctggg

SEQ ID NO: 8563 - DNA, 20 bp, Artificial Sequence
  Synthetic polynucleotide
caagacattcacgtggttcg

SEQ ID NO: 8564 - DNA, 20 bp, Artificial Sequence
  Synthetic polynucleotide
aatgtcaaaacggagctgaa

SEQ ID NO: 8565 - DNA, 20 bp, Artificial Sequence
  Synthetic polynucleotide
agcaccaggcactggggctg

SEQ ID NO: 8566 - DNA, 20 bp, Artificial Sequence
  Synthetic polynucleotide
ggcaccaggacgtatgggta

SEQ ID NO: 8567 - DNA, 20 bp, Artificial Sequence
  Synthetic polynucleotide
gtcacagacacagatccatc

SEQ ID NO: 8568 - DNA, 20 bp, Artificial Sequence
  Synthetic polynucleotide
ctcgctcattcactccctcc

SEQ ID NO: 8569 - DNA, 20 bp, Artificial Sequence
  Synthetic polynucleotide
ccgttcgcggcggacggcgg

SEQ ID NO: 8570 - DNA, 20 bp, Artificial Sequence
  Synthetic polynucleotide
ccggctgcgctgcgctgcgc

SEQ ID NO: 8571 - DNA, 20 bp, Artificial Sequence
  Synthetic polynucleotide
gaatatcgtgtagagataga

SEQ ID NO: 8572 - DNA, 20 bp, Artificial Sequence
  Synthetic polynucleotide
aaaagccagggataaaagcc

SEQ ID NO: 8573 - DNA, 20 bp, Artificial Sequence
  Synthetic polynucleotide
tacggggccaaccaggtagg

SEQ ID NO: 8574 - DNA, 20 bp, Artificial Sequence
  Synthetic polynucleotide
tctggtcctgttggtcctgt

SEQ ID NO: 8575 - DNA, 20 bp, Artificial Sequence
  Synthetic polynucleotide
ctacatcccgcagagcgcag

SEQ ID NO: 8576 - DNA, 20 bp, Artificial Sequence
  Synthetic polynucleotide
ggcggcgcgggcctcccgcg

SEQ ID NO: 8577 - DNA, 20 bp, Artificial Sequence
  Synthetic polynucleotide
ccgccactcgagcgtgcgtg

SEQ ID NO: 8578 - DNA, 20 bp, Artificial Sequence
  Synthetic polynucleotide
cgccgccgccgtggccgccg

SEQ ID NO: 8579 - DNA, 20 bp, Artificial Sequence
  Synthetic polynucleotide
ggggcccccacactacgctg

SEQ ID NO: 8580 - DNA, 20 bp, Artificial Sequence
  Synthetic polynucleotide
ggtgcagctgtcggtggggt

SEQ ID NO: 8581 - DNA, 20 bp, Artificial Sequence
  Synthetic polynucleotide
gttggcaccaggcacggacg

SEQ ID NO: 8582 - DNA, 20 bp, Artificial Sequence
  Synthetic polynucleotide
cagtgctggcggcgtcctgg

SEQ ID NO: 8583 - DNA, 20 bp, Artificial Sequence
  Synthetic polynucleotide
gctcagcatctgtcagtcag

SEQ ID NO: 8584 - DNA, 20 bp, Artificial Sequence
  Synthetic polynucleotide
gccccggggcgacggccccg

SEQ ID NO: 8585 - DNA, 20 bp, Artificial Sequence
  Synthetic polynucleotide
ccttcccagtgaggcaggca

SEQ ID NO: 8586 - DNA, 20 bp, Artificial Sequence
  Synthetic polynucleotide
gtgggagctggacctggacc

SEQ ID NO: 8587 - DNA, 20 bp, Artificial Sequence
  Synthetic polynucleotide
caactgctaaagcaagaaag

SEQ ID NO: 8588 - DNA, 20 bp, Artificial Sequence
  Synthetic polynucleotide
gtctatgtgctgtgctgtgc

SEQ ID NO: 8589 - DNA, 20 bp, Artificial Sequence
  Synthetic polynucleotide
tgacggaacttgcgctccag

SEQ ID NO: 8590 - DNA, 20 bp, Artificial Sequence
  Synthetic polynucleotide
aggccccttgcaatgtgggt

SEQ ID NO: 8591 - DNA, 20 bp, Artificial Sequence
  Synthetic polynucleotide
ctgttctgaaggcaggtgca

SEQ ID NO: 8592 - DNA, 20 bp, Artificial Sequence
  Synthetic polynucleotide
cgacggcagctctccgacga

SEQ ID NO: 8593 - DNA, 20 bp, Artificial Sequence
  Synthetic polynucleotide
cggaagagcagggagtaagt

SEQ ID NO: 8594 - DNA, 20 bp, Artificial Sequence
  Synthetic polynucleotide
atatccctcagtacaggagc

SEQ ID NO: 8595 - DNA, 20 bp, Artificial Sequence
  Synthetic polynucleotide
acctcctccagccagccagc

SEQ ID NO: 8596 - DNA, 20 bp, Artificial Sequence
  Synthetic polynucleotide
accgtgcatttctgcatttc

SEQ ID NO: 8597 - DNA, 20 bp, Artificial Sequence
  Synthetic polynucleotide
ccgggataccttggtatata

SEQ ID NO: 8598 - DNA, 20 bp, Artificial Sequence
  Synthetic polynucleotide
acatcatgtgcggggatgcg

SEQ ID NO: 8599 - DNA, 20 bp, Artificial Sequence
  Synthetic polynucleotide
accaacctggagcgtgagtg

SEQ ID NO: 8600 - DNA, 20 bp, Artificial Sequence
  Synthetic polynucleotide
ctgggctgtgaatgagggag

SEQ ID NO: 8601 - DNA, 20 bp, Artificial Sequence
  Synthetic polynucleotide
catgggcgcgcgcgcccaca

SEQ ID NO: 8602 - DNA, 20 bp, Artificial Sequence
  Synthetic polynucleotide
gtgctcagcattggcagcat

SEQ ID NO: 8603 - DNA, 20 bp, Artificial Sequence
  Synthetic polynucleotide
tgcaggtatgtcctatgtcc

SEQ ID NO: 8604 - DNA, 20 bp, Artificial Sequence
  Synthetic polynucleotide
ccaggaagtcttggaagtct

SEQ ID NO: 8605 - DNA, 20 bp, Artificial Sequence
  Synthetic polynucleotide
atgctcttctgcagagggag

SEQ ID NO: 8606 - DNA, 20 bp, Artificial Sequence
  Synthetic polynucleotide
atgaacatgggtatgaacat

SEQ ID NO: 8607 - DNA, 20 bp, Artificial Sequence
  Synthetic polynucleotide
caatgaacttacgcttggta

SEQ ID NO: 8608 - DNA, 20 bp, Artificial Sequence
  Synthetic polynucleotide
ttcttggaatggccttggaa

SEQ ID NO: 8609 - DNA, 20 bp, Artificial Sequence
  Synthetic polynucleotide
cccttcccagtgaggcaggc

SEQ ID NO: 8610 - DNA, 20 bp, Artificial Sequence
  Synthetic polynucleotide
tgtctctcttggcagtcagt

SEQ ID NO: 8611 - DNA, 20 bp, Artificial Sequence
  Synthetic polynucleotide
ggcggcggggctggcgcggc

SEQ ID NO: 8612 - DNA, 20 bp, Artificial Sequence
  Synthetic polynucleotide
cagtgtatcgctcccggccc

SEQ ID NO: 8613 - DNA, 20 bp, Artificial Sequence
  Synthetic polynucleotide
ggggagacggtgtggggaga

SEQ ID NO: 8614 - DNA, 20 bp, Artificial Sequence
  Synthetic polynucleotide
gagccaaaaaggccatgcat

SEQ ID NO: 8615 - DNA, 20 bp, Artificial Sequence
  Synthetic polynucleotide
ttgccctgggactccagcct

SEQ ID NO: 8616 - DNA, 20 bp, Artificial Sequence
  Synthetic polynucleotide
aaggtgatctcgcagctagc

SEQ ID NO: 8617 - DNA, 20 bp, Artificial Sequence
  Synthetic polynucleotide
atgggcatgcagggcatgca

SEQ ID NO: 8618 - DNA, 20 bp, Artificial Sequence
  Synthetic polynucleotide
tagcggagggcgcggggcgc

SEQ ID NO: 8619 - DNA, 20 bp, Artificial Sequence
  Synthetic polynucleotide
atggatcttacagggttaca

SEQ ID NO: 8620 - DNA, 20 bp, Artificial Sequence
  Synthetic polynucleotide
cgcgtccgcgccatgggcca

SEQ ID NO: 8621 - DNA, 20 bp, Artificial Sequence
  Synthetic polynucleotide
cccaacggttaccgttaccg

SEQ ID NO: 8622 - DNA, 20 bp, Artificial Sequence
  Synthetic polynucleotide
gagtgaaacagggatctatc

SEQ ID NO: 8623 - DNA, 20 bp, Artificial Sequence
  Synthetic polynucleotide
gagaggctgccggacaggac

SEQ ID NO: 8624 - DNA, 20 bp, Artificial Sequence
  Synthetic polynucleotide
ccaatgcaggcctcacacac

SEQ ID NO: 8625 - DNA, 20 bp, Artificial Sequence
  Synthetic polynucleotide
tctgcacgctctgcaatcaa

SEQ ID NO: 8626 - DNA, 20 bp, Artificial Sequence
  Synthetic polynucleotide
agggtcgaggtaagggaaaa

SEQ ID NO: 8627 - DNA, 20 bp, Artificial Sequence
  Synthetic polynucleotide
ctgcggggccacggtcggtc

SEQ ID NO: 8628 - DNA, 20 bp, Artificial Sequence
  Synthetic polynucleotide
ggtcatgagcaacatggtca

SEQ ID NO: 8629 - DNA, 20 bp, Artificial Sequence
  Synthetic polynucleotide
gctgccttcgggccgccttc

SEQ ID NO: 8630 - DNA, 20 bp, Artificial Sequence
  Synthetic polynucleotide
aagctggcgggaccacacac

SEQ ID NO: 8631 - DNA, 20 bp, Artificial Sequence
  Synthetic polynucleotide
tatagagtgtggtataaatg

SEQ ID NO: 8632 - DNA, 20 bp, Artificial Sequence
  Synthetic polynucleotide
gtcaccatcagcctcaatca

SEQ ID NO: 8633 - DNA, 20 bp, Artificial Sequence
  Synthetic polynucleotide
tgtccttgcagtcggcagtc

SEQ ID NO: 8634 - DNA, 20 bp, Artificial Sequence
  Synthetic polynucleotide
tggccggggccgggggccgg

SEQ ID NO: 8635 - DNA, 20 bp, Artificial Sequence
  Synthetic polynucleotide
ttctttaaacgagaaggaga

SEQ ID NO: 8636 - DNA, 20 bp, Artificial Sequence
  Synthetic polynucleotide
gcatggttcactctgaacgg

SEQ ID NO: 8637 - DNA, 20 bp, Artificial Sequence
  Synthetic polynucleotide
acccactggacactggacac

SEQ ID NO: 8638 - DNA, 20 bp, Artificial Sequence
  Synthetic polynucleotide
ggctggcagacggggccaga

SEQ ID NO: 8639 - DNA, 20 bp, Artificial Sequence
  Synthetic polynucleotide
agggagctcaccagacagac

SEQ ID NO: 8640 - DNA, 20 bp, Artificial Sequence
  Synthetic polynucleotide
aggcacgagcggcgcacgag

SEQ ID NO: 8641 - DNA, 20 bp, Artificial Sequence
  Synthetic polynucleotide
aaccacctccagcctggcct

SEQ ID NO: 8642 - DNA, 20 bp, Artificial Sequence
  Synthetic polynucleotide
ggcaaggaggtggggttgtg

SEQ ID NO: 8643 - DNA, 20 bp, Artificial Sequence
  Synthetic polynucleotide
agggaggcgcgcacgctcgg

SEQ ID NO: 8644 - DNA, 20 bp, Artificial Sequence
  Synthetic polynucleotide
ctggcagacggggccagacg

SEQ ID NO: 8645 - DNA, 20 bp, Artificial Sequence
  Synthetic polynucleotide
gcggcgcgggcctcccgcgc

SEQ ID NO: 8646 - DNA, 20 bp, Artificial Sequence
  Synthetic polynucleotide
aaaataccaatctattgttg

SEQ ID NO: 8647 - DNA, 20 bp, Artificial Sequence
  Synthetic polynucleotide
aagctgaggccgaaaagctg

SEQ ID NO: 8648 - DNA, 20 bp, Artificial Sequence
  Synthetic polynucleotide
ccaggtcggccaggcaggcc

SEQ ID NO: 8649 - DNA, 20 bp, Artificial Sequence
  Synthetic polynucleotide
gaaggcagggacttgacttg

SEQ ID NO: 8650 - DNA, 20 bp, Artificial Sequence
  Synthetic polynucleotide
tctcaaggttatgcttctca

SEQ ID NO: 8651 - DNA, 20 bp, Artificial Sequence
  Synthetic polynucleotide
tcttaccaacatctggtcaa

SEQ ID NO: 8652 - DNA, 20 bp, Artificial Sequence
  Synthetic polynucleotide
gaacatcggggctgcggtgc

SEQ ID NO: 8653 - DNA, 20 bp, Artificial Sequence
  Synthetic polynucleotide
ttgtccttgcagtcggggcg

SEQ ID NO: 8654 - DNA, 20 bp, Artificial Sequence
  Synthetic polynucleotide
gtagtgattggctgattgat

SEQ ID NO: 8655 - DNA, 20 bp, Artificial Sequence
  Synthetic polynucleotide
gcgcggcgcacgggtccgcg

SEQ ID NO: 8656 - DNA, 20 bp, Artificial Sequence
  Synthetic polynucleotide
gcgactgggtgcgctggcgc

SEQ ID NO: 8657 - DNA, 20 bp, Artificial Sequence
  Synthetic polynucleotide
gcggggagagatgactgact

SEQ ID NO: 8658 - DNA, 20 bp, Artificial Sequence
  Synthetic polynucleotide
ataaacacagagggagtgag

SEQ ID NO: 8659 - DNA, 20 bp, Artificial Sequence
  Synthetic polynucleotide
cagaaggcagctggcgggga

SEQ ID NO: 8660 - DNA, 20 bp, Artificial Sequence
  Synthetic polynucleotide
atcagtgcgaggtcggcatg

SEQ ID NO: 8661 - DNA, 20 bp, Artificial Sequence
  Synthetic polynucleotide
tgcgcacggggtcccggccc

SEQ ID NO: 8662 - DNA, 20 bp, Artificial Sequence
  Synthetic polynucleotide
ccagctactggcccagctac

SEQ ID NO: 8663 - DNA, 20 bp, Artificial Sequence
  Synthetic polynucleotide
gaaatgtcgcacggccggcc

SEQ ID NO: 8664 - DNA, 20 bp, Artificial Sequence
  Synthetic polynucleotide
ttcagctcctgcatggtgca

SEQ ID NO: 8665 - DNA, 20 bp, Artificial Sequence
  Synthetic polynucleotide
cggccccggggcgacggccc

SEQ ID NO: 8666 - DNA, 20 bp, Artificial Sequence
  Synthetic polynucleotide
cgaatctcatctcacctcac

SEQ ID NO: 8667 - DNA, 20 bp, Artificial Sequence
  Synthetic polynucleotide
gtccgcctctggtccgcctc

SEQ ID NO: 8668 - DNA, 20 bp, Artificial Sequence
  Synthetic polynucleotide
caaggggatggtactctctc

SEQ ID NO: 8669 - DNA, 20 bp, Artificial Sequence
  Synthetic polynucleotide
tggacagccacacagcacac

SEQ ID NO: 8670 - DNA, 20 bp, Artificial Sequence
  Synthetic polynucleotide
gctgcggacgccgggacgcc

SEQ ID NO: 8671 - DNA, 20 bp, Artificial Sequence
  Synthetic polynucleotide
ggaactgtgcgctggtgcgc

SEQ ID NO: 8672 - DNA, 20 bp, Artificial Sequence
  Synthetic polynucleotide
ggcccgggaggcgaaccccc

SEQ ID NO: 8673 - DNA, 20 bp, Artificial Sequence
  Synthetic polynucleotide
attttggctttctgtatgta

SEQ ID NO: 8674 - DNA, 20 bp, Artificial Sequence
  Synthetic polynucleotide
caccacatccacagacagac

SEQ ID NO: 8675 - DNA, 20 bp, Artificial Sequence
  Synthetic polynucleotide
ttgcccttggtgagcacgct

SEQ ID NO: 8676 - DNA, 20 bp, Artificial Sequence
  Synthetic polynucleotide
actgcaaggacaaatctgaa

SEQ ID NO: 8677 - DNA, 20 bp, Artificial Sequence
  Synthetic polynucleotide
caggtggccgtcgaggaccg

SEQ ID NO: 8678 - DNA, 20 bp, Artificial Sequence
  Synthetic polynucleotide
aagggcagtggtgagcaagc

SEQ ID NO: 8679 - DNA, 20 bp, Artificial Sequence
  Synthetic polynucleotide
gaggccaaagaaacccaccc

SEQ ID NO: 8680 - DNA, 20 bp, Artificial Sequence
  Synthetic polynucleotide
ttccagttacctccatggca

SEQ ID NO: 8681 - DNA, 20 bp, Artificial Sequence
  Synthetic polynucleotide
tccccatggtgatgcaagca

SEQ ID NO: 8682 - DNA, 20 bp, Artificial Sequence
  Synthetic polynucleotide
ctgcgccgggaggcccgcgc

SEQ ID NO: 8683 - DNA, 20 bp, Artificial Sequence
  Synthetic polynucleotide
aagagggccccattccacca

SEQ ID NO: 8684 - DNA, 20 bp, Artificial Sequence
  Synthetic polynucleotide
aggcgcagcagggccgcagc

SEQ ID NO: 8685 - DNA, 20 bp, Artificial Sequence
  Synthetic polynucleotide
tgaacttacagatgggtggg

SEQ ID NO: 8686 - DNA, 20 bp, Artificial Sequence
  Synthetic polynucleotide
gacccagcccggccaggagc

SEQ ID NO: 8687 - DNA, 20 bp, Artificial Sequence
  Synthetic polynucleotide
tcacccctggatatatgtat

SEQ ID NO: 8688 - DNA, 20 bp, Artificial Sequence
  Synthetic polynucleotide
gtgctgaagatgaaagaaag

SEQ ID NO: 8689 - DNA, 20 bp, Artificial Sequence
  Synthetic polynucleotide
gctggcagacggggccagac

SEQ ID NO: 8690 - DNA, 20 bp, Artificial Sequence
  Synthetic polynucleotide
aaggtgacagtgcctgcctg

SEQ ID NO: 8691 - DNA, 20 bp, Artificial Sequence
  Synthetic polynucleotide
gcaggtccagcaaccaacca

SEQ ID NO: 8692 - DNA, 20 bp, Artificial Sequence
  Synthetic polynucleotide
cgtccgcagcccgcggcccg

SEQ ID NO: 8693 - DNA, 20 bp, Artificial Sequence
  Synthetic polynucleotide
tgccaggcacaaaacggttt

SEQ ID NO: 8694 - DNA, 20 bp, Artificial Sequence
  Synthetic polynucleotide
cttgccctgggactccagcc

SEQ ID NO: 8695 - DNA, 20 bp, Artificial Sequence
  Synthetic polynucleotide
gggggcatctatgtctgcgg

SEQ ID NO: 8696 - DNA, 20 bp, Artificial Sequence
  Synthetic polynucleotide
ccttggtgcgtcatccatcc

SEQ ID NO: 8697 - DNA, 20 bp, Artificial Sequence
  Synthetic polynucleotide
aaactggagaaaaataggat

SEQ ID NO: 8698 - DNA, 20 bp, Artificial Sequence
  Synthetic polynucleotide
gccgggcgcgatgggcgcga

SEQ ID NO: 8699 - DNA, 20 bp, Artificial Sequence
  Synthetic polynucleotide
tcagggcccgcagcaacaac

SEQ ID NO: 8700 - DNA, 20 bp, Artificial Sequence
  Synthetic polynucleotide
gctggaccagctgggccagc

SEQ ID NO: 8701 - DNA, 20 bp, Artificial Sequence
  Synthetic polynucleotide
cgccatggcgatgagcgcca

SEQ ID NO: 8702 - DNA, 20 bp, Artificial Sequence
  Synthetic polynucleotide
cggagtgaatcagctcagct

SEQ ID NO: 8703 - DNA, 20 bp, Artificial Sequence
  Synthetic polynucleotide
accagggcagctacggtttc

SEQ ID NO: 8704 - DNA, 20 bp, Artificial Sequence
  Synthetic polynucleotide
aggctgctgcggccctgctg

SEQ ID NO: 8705 - DNA, 20 bp, Artificial Sequence
  Synthetic polynucleotide
ccacgctggtgctgcagggc

SEQ ID NO: 8706 - DNA, 20 bp, Artificial Sequence
  Synthetic polynucleotide
cggaatactggttgtttgtt

SEQ ID NO: 8707 - DNA, 20 bp, Artificial Sequence
  Synthetic polynucleotide
gtgagcataacactacatac

SEQ ID NO: 8708 - DNA, 20 bp, Artificial Sequence
  Synthetic polynucleotide
ccagacactacaacaacaac

SEQ ID NO: 8709 - DNA, 20 bp, Artificial Sequence
  Synthetic polynucleotide
catgtcaaggagatagatag

SEQ ID NO: 8710 - DNA, 20 bp, Artificial Sequence
  Synthetic polynucleotide
agcgatcaggatgaccacca

SEQ ID NO: 8711 - DNA, 20 bp, Artificial Sequence
  Synthetic polynucleotide
cgggggagctgcagtccgtc

SEQ ID NO: 8712 - DNA, 20 bp, Artificial Sequence
  Synthetic polynucleotide
aggaggtgggggctggggcg

SEQ ID NO: 8713 - DNA, 20 bp, Artificial Sequence
  Synthetic polynucleotide
agctctgcgtgaaccgaacc

SEQ ID NO: 8714 - DNA, 20 bp, Artificial Sequence
  Synthetic polynucleotide
gccgcgagaggttatgggag

SEQ ID NO: 8715 - DNA, 20 bp, Artificial Sequence
  Synthetic polynucleotide
tggttgggatggggctggat

SEQ ID NO: 8716 - DNA, 20 bp, Artificial Sequence
  Synthetic polynucleotide
tgtgatgaagctgaaggaag

SEQ ID NO: 8717 - DNA, 20 bp, Artificial Sequence
  Synthetic polynucleotide
agctctggcacagccagctc

SEQ ID NO: 8718 - DNA, 20 bp, Artificial Sequence
  Synthetic polynucleotide
ggtttggttgtcagggcccc

SEQ ID NO: 8719 - DNA, 20 bp, Artificial Sequence
  Synthetic polynucleotide
caacagcatgattgacagac

SEQ ID NO: 8720 - DNA, 20 bp, Artificial Sequence
  Synthetic polynucleotide
ggatgttgtgctgctgctgc

SEQ ID NO: 8721 - DNA, 20 bp, Artificial Sequence
  Synthetic polynucleotide
agaaagcaagagtggtggtg

SEQ ID NO: 8722 - DNA, 20 bp, Artificial Sequence
  Synthetic polynucleotide
gacgagactatctggctggc

SEQ ID NO: 8723 - DNA, 20 bp, Artificial Sequence
  Synthetic polynucleotide
ggctcataccgcgtgtggtg

SEQ ID NO: 8724 - DNA, 20 bp, Artificial Sequence
  Synthetic polynucleotide
atgggggaacgccggagaat

SEQ ID NO: 8725 - DNA, 20 bp, Artificial Sequence
  Synthetic polynucleotide
gggatacctgacaggggagg

SEQ ID NO: 8726 - DNA, 20 bp, Artificial Sequence
  Synthetic polynucleotide
actgcgctgagggcccgctg

SEQ ID NO: 8727 - DNA, 20 bp, Artificial Sequence
  Synthetic polynucleotide
ggtggcgggctgggccagcc

SEQ ID NO: 8728 - DNA, 20 bp, Artificial Sequence
  Synthetic polynucleotide
tccctgcccccaggagtgag

SEQ ID NO: 8729 - DNA, 20 bp, Artificial Sequence
  Synthetic polynucleotide
agggggtgcagggccggccg

SEQ ID NO: 8730 - DNA, 20 bp, Artificial Sequence
  Synthetic polynucleotide
gctcctgaacgtggaaggaa

SEQ ID NO: 8731 - DNA, 20 bp, Artificial Sequence
  Synthetic polynucleotide
tgaccgccttactgaaatga

SEQ ID NO: 8732 - DNA, 20 bp, Artificial Sequence
  Synthetic polynucleotide
acatcaagcgccgggacatc

SEQ ID NO: 8733 - DNA, 20 bp, Artificial Sequence
  Synthetic polynucleotide
ttagaacatatcatctggtc

SEQ ID NO: 8734 - DNA, 20 bp, Artificial Sequence
  Synthetic polynucleotide
tgtaggggttcagcagggca

SEQ ID NO: 8735 - DNA, 20 bp, Artificial Sequence
  Synthetic polynucleotide
ttctagcggccatcgaggga

SEQ ID NO: 8736 - DNA, 20 bp, Artificial Sequence
  Synthetic polynucleotide
ccttgtgatgttagttagtt

SEQ ID NO: 8737 - DNA, 20 bp, Artificial Sequence
  Synthetic polynucleotide
aggtactacgagaccgagac

SEQ ID NO: 8738 - DNA, 20 bp, Artificial Sequence
  Synthetic polynucleotide
tgtgggtgctgagggtgccg

SEQ ID NO: 8739 - DNA, 20 bp, Artificial Sequence
  Synthetic polynucleotide
ggggcggtttggggcggttt

SEQ ID NO: 8740 - DNA, 20 bp, Artificial Sequence
  Synthetic polynucleotide
catgaacacgcgcacgggca

SEQ ID NO: 8741 - DNA, 20 bp, Artificial Sequence
  Synthetic polynucleotide
ggcgcctgccccggccggcc

SEQ ID NO: 8742 - DNA, 20 bp, Artificial Sequence
  Synthetic polynucleotide
gccatgtacagcgagcgagc

SEQ ID NO: 8743 - DNA, 20 bp, Artificial Sequence
  Synthetic polynucleotide
cctgcgccgggaggcccgcg

SEQ ID NO: 8744 - DNA, 20 bp, Artificial Sequence
  Synthetic polynucleotide
ctgacgacgttccgacgttc

SEQ ID NO: 8745 - DNA, 20 bp, Artificial Sequence
  Synthetic polynucleotide
cttgagcactgtgagcactg

SEQ ID NO: 8746 - DNA, 20 bp, Artificial Sequence
  Synthetic polynucleotide
ccaggtgcacgatgcgtcgt

SEQ ID NO: 8747 - DNA, 20 bp, Artificial Sequence
  Synthetic polynucleotide
tccctctacgcctccgcctc

SEQ ID NO: 8748 - DNA, 20 bp, Artificial Sequence
  Synthetic polynucleotide
ccagctcgcgcaggctgcgc

SEQ ID NO: 8749 - DNA, 20 bp, Artificial Sequence
  Synthetic polynucleotide
gagctggcgtttctgcgcag

SEQ ID NO: 8750 - DNA, 20 bp, Artificial Sequence
  Synthetic polynucleotide
ggccacaggctctgggccac

SEQ ID NO: 8751 - DNA, 20 bp, Artificial Sequence
  Synthetic polynucleotide
gttcacggggattaccaacc

SEQ ID NO: 8752 - DNA, 20 bp, Artificial Sequence
  Synthetic polynucleotide
cctgctggacctcactcgct

SEQ ID NO: 8753 - DNA, 20 bp, Artificial Sequence
  Synthetic polynucleotide
agcggagggcgcggggcgcg

SEQ ID NO: 8754 - DNA, 20 bp, Artificial Sequence
  Synthetic polynucleotide
acgtcgccccggggccgccc

SEQ ID NO: 8755 - DNA, 20 bp, Artificial Sequence
  Synthetic polynucleotide
gttcgctgaaggggaaggga

SEQ ID NO: 8756 - DNA, 20 bp, Artificial Sequence
  Synthetic polynucleotide
cctgtgcaccatgtgtaggt

SEQ ID NO: 8757 - DNA, 20 bp, Artificial Sequence
  Synthetic polynucleotide
tcagatacagccaggctgat

SEQ ID NO: 8758 - DNA, 20 bp, Artificial Sequence
  Synthetic polynucleotide
cctgcgcacgctgcgcacgc

SEQ ID NO: 8759 - DNA, 20 bp, Artificial Sequence
  Synthetic polynucleotide
atcctggatgttgcacggca

SEQ ID NO: 8760 - DNA, 20 bp, Artificial Sequence
  Synthetic polynucleotide
ctgaggaatgcagaatgcag

SEQ ID NO: 8761 - DNA, 20 bp, Artificial Sequence
  Synthetic polynucleotide
tgtccgcggcatgcggcatg

SEQ ID NO: 8762 - DNA, 20 bp, Artificial Sequence
  Synthetic polynucleotide
ggggccgggattggatggat

SEQ ID NO: 8763 - DNA, 20 bp, Artificial Sequence
  Synthetic polynucleotide
atctgcacgcggccgccgcg

SEQ ID NO: 8764 - DNA, 20 bp, Artificial Sequence
  Synthetic polynucleotide
atccaagtaagagaagtaag

SEQ ID NO: 8765 - DNA, 20 bp, Artificial Sequence
  Synthetic polynucleotide
tggccgacagttggatggat

SEQ ID NO: 8766 - DNA, 20 bp, Artificial Sequence
  Synthetic polynucleotide
gcgtgaacctggagggtggg

SEQ ID NO: 8767 - DNA, 20 bp, Artificial Sequence
  Synthetic polynucleotide
gccgggagacggggctgctg

SEQ ID NO: 8768 - DNA, 20 bp, Artificial Sequence
  Synthetic polynucleotide
tcaccgtgcggcacagctcg

SEQ ID NO: 8769 - DNA, 20 bp, Artificial Sequence
  Synthetic polynucleotide
tggggctggctggggctggc

SEQ ID NO: 8770 - DNA, 20 bp, Artificial Sequence
  Synthetic polynucleotide
ccaacgaccatacccgtccg

SEQ ID NO: 8771 - DNA, 20 bp, Artificial Sequence
  Synthetic polynucleotide
cgcggcgctggacgacggcg

SEQ ID NO: 8772 - DNA, 20 bp, Artificial Sequence
  Synthetic polynucleotide
tgggccgggccgggcagggc

SEQ ID NO: 8773 - DNA, 20 bp, Artificial Sequence
  Synthetic polynucleotide
aaacgccccggcaggaagcc

SEQ ID NO: 8774 - DNA, 20 bp, Artificial Sequence
  Synthetic polynucleotide
tgcgagagctgcggcagctg

SEQ ID NO: 8775 - DNA, 20 bp, Artificial Sequence
  Synthetic polynucleotide
gccggaacagcacggaatcc

SEQ ID NO: 8776 - DNA, 20 bp, Artificial Sequence
  Synthetic polynucleotide
cgccccctcgcggtgcggtg

SEQ ID NO: 8777 - DNA, 20 bp, Artificial Sequence
  Synthetic polynucleotide
ggagatggaggccgggaggc

SEQ ID NO: 8778 - DNA, 20 bp, Artificial Sequence
  Synthetic polynucleotide
tgacgtggcgtggcgtggcg

SEQ ID NO: 8779 - DNA, 20 bp, Artificial Sequence
  Synthetic polynucleotide
ccaccgcacttggctgttgt

SEQ ID NO: 8780 - DNA, 20 bp, Artificial Sequence
  Synthetic polynucleotide
tgctctggactcgtgctctc

SEQ ID NO: 8781 - DNA, 20 bp, Artificial Sequence
  Synthetic polynucleotide
cgaaggcctgtgggtgctgt

SEQ ID NO: 8782 - DNA, 20 bp, Artificial Sequence
  Synthetic polynucleotide
cctatgcaggtgtccaacgg

SEQ ID NO: 8783 - DNA, 20 bp, Artificial Sequence
  Synthetic polynucleotide
gcccttgttgaggtgttgtt

SEQ ID NO: 8784 - DNA, 20 bp, Artificial Sequence
  Synthetic polynucleotide
gtgctgctgcgtgctgcgtg

SEQ ID NO: 8785 - DNA, 20 bp, Artificial Sequence
  Synthetic polynucleotide
caggcggcggtgcggcggtg

SEQ ID NO: 8786 - DNA, 20 bp, Artificial Sequence
  Synthetic polynucleotide
gaggacctgcagcgggtggg

SEQ ID NO: 8787 - DNA, 20 bp, Artificial Sequence
  Synthetic polynucleotide
cggcgggaggaggcggcggg

SEQ ID NO: 8788 - DNA, 20 bp, Artificial Sequence
  Synthetic polynucleotide
atgaagactgacaggatgga

SEQ ID NO: 8789 - DNA, 20 bp, Artificial Sequence
  Synthetic polynucleotide
agggaggcccggatgctgaa

SEQ ID NO: 8790 - DNA, 20 bp, Artificial Sequence
  Synthetic polynucleotide
cccggggccgccgacccacc

SEQ ID NO: 8791 - DNA, 20 bp, Artificial Sequence
  Synthetic polynucleotide
cgttgcccaggagctagctg

SEQ ID NO: 8792 - DNA, 20 bp, Artificial Sequence
  Synthetic polynucleotide
cagctccaggtacgtctgtc

SEQ ID NO: 8793 - DNA, 20 bp, Artificial Sequence
  Synthetic polynucleotide
ttgaggtagaaagggaacta

SEQ ID NO: 8794 - DNA, 20 bp, Artificial Sequence
  Synthetic polynucleotide
ggccatgtacagcgagcagc

SEQ ID NO: 8795 - DNA, 20 bp, Artificial Sequence
  Synthetic polynucleotide
ccaggaggtgaggttgcagg

SEQ ID NO: 8796 - DNA, 20 bp, Artificial Sequence
  Synthetic polynucleotide
ctgtctccagcggtgcggtg

SEQ ID NO: 8797 - DNA, 20 bp, Artificial Sequence
  Synthetic polynucleotide
gcacgaagacatcgataata

SEQ ID NO: 8798 - DNA, 20 bp, Artificial Sequence
  Synthetic polynucleotide
gttgaatttccagcttcagg

SEQ ID NO: 8799 - DNA, 20 bp, Artificial Sequence
  Synthetic polynucleotide
gcacggcagcgggccctcag

SEQ ID NO: 8800 - DNA, 20 bp, Artificial Sequence
  Synthetic polynucleotide
agtcattactagggaaggga

SEQ ID NO: 8801 - DNA, 20 bp, Artificial Sequence
  Synthetic polynucleotide
tgactggctggccacggcca

SEQ ID NO: 8802 - DNA, 20 bp, Artificial Sequence
  Synthetic polynucleotide
ctgggatgctgggccccgct

SEQ ID NO: 8803 - DNA, 20 bp, Artificial Sequence
  Synthetic polynucleotide
tcctgctgtccctaggaccc

SEQ ID NO: 8804 - DNA, 20 bp, Artificial Sequence
  Synthetic polynucleotide
cctggtactcctgggtctcc

SEQ ID NO: 8805 - DNA, 20 bp, Artificial Sequence
  Synthetic polynucleotide
aacccactcacacttcacac

SEQ ID NO: 8806 - DNA, 20 bp, Artificial Sequence
  Synthetic polynucleotide
ggtccgggcgtgcgggcgtg

SEQ ID NO: 8807 - DNA, 20 bp, Artificial Sequence
  Synthetic polynucleotide
gcattgcagtgacggatgga

SEQ ID NO: 8808 - DNA, 20 bp, Artificial Sequence
  Synthetic polynucleotide
cactacatcacagaggctgt

SEQ ID NO: 8809 - DNA, 20 bp, Artificial Sequence
  Synthetic polynucleotide
atcgacggcatcggcggcat

SEQ ID NO: 8810 - DNA, 20 bp, Artificial Sequence
  Synthetic polynucleotide
gctccgcgcttgagggcgga

SEQ ID NO: 8811 - DNA, 20 bp, Artificial Sequence
  Synthetic polynucleotide
ctgctcgggccgcgggccgc

SEQ ID NO: 8812 - DNA, 20 bp, Artificial Sequence
  Synthetic polynucleotide
ataccggagccaatggtatc

SEQ ID NO: 8813 - DNA, 20 bp, Artificial Sequence
  Synthetic polynucleotide
aaggggctctgtggacagac

SEQ ID NO: 8814 - DNA, 20 bp, Artificial Sequence
  Synthetic polynucleotide
gacgcgctctcgtaggtggt

SEQ ID NO: 8815 - DNA, 20 bp, Artificial Sequence
  Synthetic polynucleotide
cgactgcaaggacaaatctg

SEQ ID NO: 8816 - DNA, 20 bp, Artificial Sequence
  Synthetic polynucleotide
gcccgggaggcgaacccccc

SEQ ID NO: 8817 - DNA, 20 bp, Artificial Sequence
  Synthetic polynucleotide
gccgcgggagcgagggagcg

SEQ ID NO: 8818 - DNA, 20 bp, Artificial Sequence
  Synthetic polynucleotide
gaggtgggggctggggcgtg

SEQ ID NO: 8819 - DNA, 20 bp, Artificial Sequence
  Synthetic polynucleotide
gccacacgggccttgacgta

SEQ ID NO: 8820 - DNA, 20 bp, Artificial Sequence
  Synthetic polynucleotide
aaggcgctgctgctctgcgc

SEQ ID NO: 8821 - DNA, 20 bp, Artificial Sequence
  Synthetic polynucleotide
cgaaagccggggagtgagtg

SEQ ID NO: 8822 - DNA, 20 bp, Artificial Sequence
  Synthetic polynucleotide
cccggggcccgcgggcccgc

SEQ ID NO: 8823 - DNA, 20 bp, Artificial Sequence
  Synthetic polynucleotide
gggcacacttgaagaaagaa

SEQ ID NO: 8824 - DNA, 20 bp, Artificial Sequence
  Synthetic polynucleotide
cttcggctacagctacagct

SEQ ID NO: 8825 - DNA, 20 bp, Artificial Sequence
  Synthetic polynucleotide
gcgggaccagcaggaccagc

SEQ ID NO: 8826 - DNA, 20 bp, Artificial Sequence
  Synthetic polynucleotide
gacggcgacggtgtagtgga

SEQ ID NO: 8827 - DNA, 20 bp, Artificial Sequence
  Synthetic polynucleotide
gcccatgcaggctgggtggg

SEQ ID NO: 8828 - DNA, 20 bp, Artificial Sequence
  Synthetic polynucleotide
agggcagccaggacgccgcc

SEQ ID NO: 8829 - DNA, 20 bp, Artificial Sequence
  Synthetic polynucleotide
cgggccgtgtgccgccccgc

SEQ ID NO: 8830 - DNA, 20 bp, Artificial Sequence
  Synthetic polynucleotide
ggccccggggcgacgcgacg

SEQ ID NO: 8831 - DNA, 20 bp, Artificial Sequence
  Synthetic polynucleotide
tctccagcccgggtcggcgg

SEQ ID NO: 8832 - DNA, 20 bp, Artificial Sequence
  Synthetic polynucleotide
gcacggctcaggtgccagca

SEQ ID NO: 8833 - DNA, 20 bp, Artificial Sequence
  Synthetic polynucleotide
aagcagaaggcgctgcatgc

SEQ ID NO: 8834 - DNA, 20 bp, Artificial Sequence
  Synthetic polynucleotide
ggtgtggaaggagtcgccgc

SEQ ID NO: 8835 - DNA, 20 bp, Artificial Sequence
  Synthetic polynucleotide
ccggacggcatgctgcttgc

SEQ ID NO: 8836 - DNA, 20 bp, Artificial Sequence
  Synthetic polynucleotide
ccacgtcaacaacggcaact

SEQ ID NO: 8837 - DNA, 20 bp, Artificial Sequence
  Synthetic polynucleotide
tacttacgaactgctgggtt

SEQ ID NO: 8838 - DNA, 20 bp, Artificial Sequence
  Synthetic polynucleotide
cagaggcacttaactaactc

SEQ ID NO: 8839 - DNA, 20 bp, Artificial Sequence
  Synthetic polynucleotide
gcgagcgcaggcggcgcagg

SEQ ID NO: 8840 - DNA, 20 bp, Artificial Sequence
  Synthetic polynucleotide
atgctcaatctgatagaaga

SEQ ID NO: 8841 - DNA, 20 bp, Artificial Sequence
  Synthetic polynucleotide
tctggaacacgtcagcgggc

SEQ ID NO: 8842 - DNA, 20 bp, Artificial Sequence
  Synthetic polynucleotide
ggcaccgcataggggagggg

SEQ ID NO: 8843 - DNA, 20 bp, Artificial Sequence
  Synthetic polynucleotide
ctgcaaggacaaatctgaca

SEQ ID NO: 8844 - DNA, 20 bp, Artificial Sequence
  Synthetic polynucleotide
atcttcgcagtcttcgcagt

SEQ ID NO: 8845 - DNA, 20 bp, Artificial Sequence
  Synthetic polynucleotide
gcagccacagtgtgctgctc

SEQ ID NO: 8846 - DNA, 20 bp, Artificial Sequence
  Synthetic polynucleotide
ggctaggtccaggtgcgtgc

SEQ ID NO: 8847 - DNA, 20 bp, Artificial Sequence
  Synthetic polynucleotide
ggtagctgtggatgcggcgg

SEQ ID NO: 8848 - DNA, 20 bp, Artificial Sequence
  Synthetic polynucleotide
tggctgcgctgggctgcgct

SEQ ID NO: 8849 - DNA, 20 bp, Artificial Sequence
  Synthetic polynucleotide
gtgccggccagccggcccgc

SEQ ID NO: 8850 - DNA, 20 bp, Artificial Sequence
  Synthetic polynucleotide
cactaccccccgcggaagag

SEQ ID NO: 8851 - DNA, 20 bp, Artificial Sequence
  Synthetic polynucleotide
tggggccctgggggaagcct

SEQ ID NO: 8852 - DNA, 20 bp, Artificial Sequence
  Synthetic polynucleotide
acccggggcccgcgggcccg

SEQ ID NO: 8853 - DNA, 20 bp, Artificial Sequence
  Synthetic polynucleotide
tgccctgcctgtgaggggag

SEQ ID NO: 8854 - DNA, 20 bp, Artificial Sequence
  Synthetic polynucleotide
gattcccatcaaacaaacag

SEQ ID NO: 8855 - DNA, 20 bp, Artificial Sequence
  Synthetic polynucleotide
cgccccttggggccaccctg

SEQ ID NO: 8856 - DNA, 20 bp, Artificial Sequence
  Synthetic polynucleotide
actgctcgggccgcgggccg

SEQ ID NO: 8857 - DNA, 20 bp, Artificial Sequence
  Synthetic polynucleotide
aagggcgcactgctgctgct

SEQ ID NO: 8858 - DNA, 20 bp, Artificial Sequence
  Synthetic polynucleotide
cctcgcaggagtctgatgac

SEQ ID NO: 8859 - DNA, 20 bp, Artificial Sequence
  Synthetic polynucleotide
agagaagtctcgagaccacc

SEQ ID NO: 8860 - DNA, 20 bp, Artificial Sequence
  Synthetic polynucleotide
tgcagacgaggacgaggacg

SEQ ID NO: 8861 - DNA, 20 bp, Artificial Sequence
  Synthetic polynucleotide
gccacgccagggtactactg

SEQ ID NO: 8862 - DNA, 20 bp, Artificial Sequence
  Synthetic polynucleotide
ataaacatacggaggagtcg

SEQ ID NO: 8863 - DNA, 20 bp, Artificial Sequence
  Synthetic polynucleotide
tgcggcggctgcggcggctg

SEQ ID NO: 8864 - DNA, 20 bp, Artificial Sequence
  Synthetic polynucleotide
gcgaagatgcgaagatgcga

SEQ ID NO: 8865 - DNA, 20 bp, Artificial Sequence
  Synthetic polynucleotide
ggcccggaacatggacggac

SEQ ID NO: 8866 - DNA, 20 bp, Artificial Sequence
  Synthetic polynucleotide
actttaggcagaggctgggc

SEQ ID NO: 8867 - DNA, 20 bp, Artificial Sequence
  Synthetic polynucleotide
gggccacagagatggcgggc

SEQ ID NO: 8868 - DNA, 20 bp, Artificial Sequence
  Synthetic polynucleotide
cgggctgcccggctcgtccc

SEQ ID NO: 8869 - DNA, 20 bp, Artificial Sequence
  Synthetic polynucleotide
ccctgcggcgctaagtaaga

SEQ ID NO: 8870 - DNA, 20 bp, Artificial Sequence
  Synthetic polynucleotide
gcggggaactggcgcggcgc

SEQ ID NO: 8871 - DNA, 20 bp, Artificial Sequence
  Synthetic polynucleotide
cgctgcgcacgtccggtccg

SEQ ID NO: 8872 - DNA, 20 bp, Artificial Sequence
  Synthetic polynucleotide
gccctccgtcagcagcagca

SEQ ID NO: 8873 - DNA, 20 bp, Artificial Sequence
  Synthetic polynucleotide
agtggcaatggcaatggcaa

SEQ ID NO: 8874 - DNA, 20 bp, Artificial Sequence
  Synthetic polynucleotide
tgctggggatgctgctgctg

SEQ ID NO: 8875 - DNA, 20 bp, Artificial Sequence
  Synthetic polynucleotide
tgacgtgggctgggccgggc

SEQ ID NO: 8876 - DNA, 20 bp, Artificial Sequence
  Synthetic polynucleotide
gacatggctcacacggcaca

SEQ ID NO: 8877 - DNA, 20 bp, Artificial Sequence
  Synthetic polynucleotide
gttatggatgccgaagatga

SEQ ID NO: 8878 - DNA, 20 bp, Artificial Sequence
  Synthetic polynucleotide
ccggcggcggaagctcccgg

SEQ ID NO: 8879 - DNA, 20 bp, Artificial Sequence
  Synthetic polynucleotide
tgacaatggcctggggctga

SEQ ID NO: 8880 - DNA, 20 bp, Artificial Sequence
  Synthetic polynucleotide
ggcgcagcagggccgcagca

SEQ ID NO: 8881 - DNA, 20 bp, Artificial Sequence
  Synthetic polynucleotide
gagagctgcggctgcggctg

SEQ ID NO: 8882 - DNA, 20 bp, Artificial Sequence
  Synthetic polynucleotide
gagctggcccggcggcggcc

SEQ ID NO: 8883 - DNA, 20 bp, Artificial Sequence
  Synthetic polynucleotide
aagttgtccttccgcaggcc

SEQ ID NO: 8884 - DNA, 20 bp, Artificial Sequence
  Synthetic polynucleotide
gggcagagacaggtaggtac

SEQ ID NO: 8885 - DNA, 20 bp, Artificial Sequence
  Synthetic polynucleotide
gcaagctgggcggggggggg

SEQ ID NO: 8886 - DNA, 20 bp, Artificial Sequence
  Synthetic polynucleotide
gtggagtggagcactcactt

SEQ ID NO: 8887 - DNA, 20 bp, Artificial Sequence
  Synthetic polynucleotide
gaggctgtgcgggaaatgtg

SEQ ID NO: 8888 - DNA, 20 bp, Artificial Sequence
  Synthetic polynucleotide
cgttctttggggccatcatc

SEQ ID NO: 8889 - DNA, 20 bp, Artificial Sequence
  Synthetic polynucleotide
gagtgcaggactaaagggta

SEQ ID NO: 8890 - DNA, 20 bp, Artificial Sequence
  Synthetic polynucleotide
atctcatcgtttgcgccgcc

SEQ ID NO: 8891 - DNA, 20 bp, Artificial Sequence
  Synthetic polynucleotide
tcttggacggcggccggccg

SEQ ID NO: 8892 - DNA, 20 bp, Artificial Sequence
  Synthetic polynucleotide
gctggagtgtgaggagtgtg

SEQ ID NO: 8893 - DNA, 20 bp, Artificial Sequence
  Synthetic polynucleotide
ggcaccaagcggtacgtaca

SEQ ID NO: 8894 - DNA, 20 bp, Artificial Sequence
  Synthetic polynucleotide
ggccacttgtgccttgtgcc

SEQ ID NO: 8895 - DNA, 20 bp, Artificial Sequence
  Synthetic polynucleotide
cggtggctgagctggatgga

SEQ ID NO: 8896 - DNA, 20 bp, Artificial Sequence
  Synthetic polynucleotide
tctcggtgatgagcagcagc

SEQ ID NO: 8897 - DNA, 20 bp, Artificial Sequence
  Synthetic polynucleotide
tgtttttatcaacggcaggc

SEQ ID NO: 8898 - DNA, 20 bp, Artificial Sequence
  Synthetic polynucleotide
gcagccaccaagagccggcc

SEQ ID NO: 8899 - DNA, 20 bp, Artificial Sequence
  Synthetic polynucleotide
ggggaggtgtcggccggcct

SEQ ID NO: 8900 - DNA, 20 bp, Artificial Sequence
  Synthetic polynucleotide
ggacggactggtcccccccc

SEQ ID NO: 8901 - DNA, 20 bp, Artificial Sequence
  Synthetic polynucleotide
actactataccggatggata

SEQ ID NO: 8902 - DNA, 20 bp, Artificial Sequence
  Synthetic polynucleotide
ccgggagacggggctggaga

SEQ ID NO: 8903 - DNA, 20 bp, Artificial Sequence
  Synthetic polynucleotide
gcctgggcgcggaggagcgg

SEQ ID NO: 8904 - DNA, 20 bp, Artificial Sequence
  Synthetic polynucleotide
tagaggtcgatggccccgtc

SEQ ID NO: 8905 - DNA, 20 bp, Artificial Sequence
  Synthetic polynucleotide
gccttctaccggaaagatga

SEQ ID NO: 8906 - DNA, 20 bp, Artificial Sequence
  Synthetic polynucleotide
ttgaagtactgggggatgga

SEQ ID NO: 8907 - DNA, 20 bp, Artificial Sequence
  Synthetic polynucleotide
atttcttgccaaggcctgcc

SEQ ID NO: 8908 - DNA, 20 bp, Artificial Sequence
  Synthetic polynucleotide
gtgcccagccagccagccag

SEQ ID NO: 8909 - DNA, 20 bp, Artificial Sequence
  Synthetic polynucleotide
gcagcctggctgccgcagcc

SEQ ID NO: 8910 - DNA, 20 bp, Artificial Sequence
  Synthetic polynucleotide
cgtggaaactgtccacaaca

SEQ ID NO: 8911 - DNA, 20 bp, Artificial Sequence
  Synthetic polynucleotide
tggctacgcaggcaggcagg

SEQ ID NO: 8912 - DNA, 20 bp, Artificial Sequence
  Synthetic polynucleotide
gccactgcccgggaggcatg

SEQ ID NO: 8913 - DNA, 20 bp, Artificial Sequence
  Synthetic polynucleotide
acactctgtgcctgcgtgcg

SEQ ID NO: 8914 - DNA, 20 bp, Artificial Sequence
  Synthetic polynucleotide
cgtgtgcaatacaggtggta

SEQ ID NO: 8915 - DNA, 20 bp, Artificial Sequence
  Synthetic polynucleotide
aggagctgtgcacgacgaca

SEQ ID NO: 8916 - DNA, 20 bp, Artificial Sequence
  Synthetic polynucleotide
gctgcccgcgctgctgctgc

SEQ ID NO: 8917 - DNA, 20 bp, Artificial Sequence
  Synthetic polynucleotide
agccatagctggggcagggc

SEQ ID NO: 8918 - DNA, 20 bp, Artificial Sequence
  Synthetic polynucleotide
tgcgcgcgcgcgccgcgccg

SEQ ID NO: 8919 - DNA, 20 bp, Artificial Sequence
  Synthetic polynucleotide
ccgggtgggcggcccgcccg

SEQ ID NO: 8920 - DNA, 20 bp, Artificial Sequence
  Synthetic polynucleotide
tgtctgcggccgccgtgccg

SEQ ID NO: 8921 - DNA, 20 bp, Artificial Sequence
  Synthetic polynucleotide
gaagatggcggcagcggcag

SEQ ID NO: 8922 - DNA, 20 bp, Artificial Sequence
  Synthetic polynucleotide
gtggctggcgcaggcgggcg

SEQ ID NO: 8923 - DNA, 20 bp, Artificial Sequence
  Synthetic polynucleotide
ggcatcccggggccctggtg

SEQ ID NO: 8924 - DNA, 20 bp, Artificial Sequence
  Synthetic polynucleotide
tttggcaggagctgctgggc

SEQ ID NO: 8925 - DNA, 20 bp, Artificial Sequence
  Synthetic polynucleotide
ccaggtccacgggcagacga

SEQ ID NO: 8926 - DNA, 20 bp, Artificial Sequence
  Synthetic polynucleotide
cagtggctgggctgcgggtc

SEQ ID NO: 8927 - DNA, 20 bp, Artificial Sequence
  Synthetic polynucleotide
tgacacagaaaagagaggag

SEQ ID NO: 8928 - DNA, 20 bp, Artificial Sequence
  Synthetic polynucleotide
cagcaagctgggcggggggg

SEQ ID NO: 8929 - DNA, 20 bp, Artificial Sequence
  Synthetic polynucleotide
cccggtcttgggacggacgc

SEQ ID NO: 8930 - DNA, 20 bp, Artificial Sequence
  Synthetic polynucleotide
tggggccgggccgggccggc

SEQ ID NO: 8931 - DNA, 20 bp, Artificial Sequence
  Synthetic polynucleotide
acactcgcctgtgaagatga

SEQ ID NO: 8932 - DNA, 20 bp, Artificial Sequence
  Synthetic polynucleotide
gctgctgcgcggcggctgcg

SEQ ID NO: 8933 - DNA, 20 bp, Artificial Sequence
  Synthetic polynucleotide
acctactgtccccagaggag

SEQ ID NO: 8934 - DNA, 20 bp, Artificial Sequence
  Synthetic polynucleotide
gtgacaggaggaacggagga

SEQ ID NO: 8935 - DNA, 20 bp, Artificial Sequence
  Synthetic polynucleotide
gagctgccccggagccgccc

SEQ ID NO: 8936 - DNA, 20 bp, Artificial Sequence
  Synthetic polynucleotide
caccgcctgctgctgctgct

SEQ ID NO: 8937 - DNA, 20 bp, Artificial Sequence
  Synthetic polynucleotide
cggcgggccacactctgcct

SEQ ID NO: 8938 - DNA, 20 bp, Artificial Sequence
  Synthetic polynucleotide
acagaatggctcctctcctc

SEQ ID NO: 8939 - DNA, 20 bp, Artificial Sequence
  Synthetic polynucleotide
aactgtgtggtgatgcgacg

SEQ ID NO: 8940 - DNA, 20 bp, Artificial Sequence
  Synthetic polynucleotide
ctgcaggacaacggcaggac

SEQ ID NO: 8941 - DNA, 20 bp, Artificial Sequence
  Synthetic polynucleotide
gctctccacgtcgcccgccc

SEQ ID NO: 8942 - DNA, 20 bp, Artificial Sequence
  Synthetic polynucleotide
gtgggagcaggaggcctgcc

SEQ ID NO: 8943 - DNA, 20 bp, Artificial Sequence
  Synthetic polynucleotide
ctccttccacggcacctgcc

SEQ ID NO: 8944 - DNA, 20 bp, Artificial Sequence
  Synthetic polynucleotide
gcatctacattgacgacgac

SEQ ID NO: 8945 - DNA, 20 bp, Artificial Sequence
  Synthetic polynucleotide
tgcgcataggcctgggccct

SEQ ID NO: 8946 - DNA, 20 bp, Artificial Sequence
  Synthetic polynucleotide
ataggtgttattggaggtgg

SEQ ID NO: 8947 - DNA, 20 bp, Artificial Sequence
  Synthetic polynucleotide
acagcagccgcaggagccgc

SEQ ID NO: 8948 - DNA, 20 bp, Artificial Sequence
  Synthetic polynucleotide
agaagtggcactgcctgccc

SEQ ID NO: 8949 - DNA, 20 bp, Artificial Sequence
  Synthetic polynucleotide
ttgtccttgtggatgggggg

SEQ ID NO: 8950 - DNA, 20 bp, Artificial Sequence
  Synthetic polynucleotide
gaagcctctgggctcgggct

SEQ ID NO: 8951 - DNA, 20 bp, Artificial Sequence
  Synthetic polynucleotide
ggaggcgccgcctgggttgg

SEQ ID NO: 8952 - DNA, 20 bp, Artificial Sequence
  Synthetic polynucleotide
ggcattttatagctgcttgc

SEQ ID NO: 8953 - DNA, 20 bp, Artificial Sequence
  Synthetic polynucleotide
gtgaccgcttgaactggctg

SEQ ID NO: 8954 - DNA, 20 bp, Artificial Sequence
  Synthetic polynucleotide
gtcgccgatgaagagaagaa

SEQ ID NO: 8955 - DNA, 20 bp, Artificial Sequence
  Synthetic polynucleotide
tacctggtgcgggaggaggg

SEQ ID NO: 8956 - DNA, 20 bp, Artificial Sequence
  Synthetic polynucleotide
gtggaatgaggccgaggccg

SEQ ID NO: 8957 - DNA, 20 bp, Artificial Sequence
  Synthetic polynucleotide
ctggtactcctgggtctcct

SEQ ID NO: 8958 - DNA, 20 bp, Artificial Sequence
  Synthetic polynucleotide
tgctcgtggtgatctgctcg

SEQ ID NO: 8959 - DNA, 20 bp, Artificial Sequence
  Synthetic polynucleotide
gttgcgcagccaccggacac

SEQ ID NO: 8960 - DNA, 20 bp, Artificial Sequence
  Synthetic polynucleotide
ccttggtcagcggaggcggg

SEQ ID NO: 8961 - DNA, 20 bp, Artificial Sequence
  Synthetic polynucleotide
gctgctccaggaagtcggct

SEQ ID NO: 8962 - DNA, 20 bp, Artificial Sequence
  Synthetic polynucleotide
gtagcggagggcgcggggcg

SEQ ID NO: 8963 - DNA, 20 bp, Artificial Sequence
  Synthetic polynucleotide
ctttacgtaaatcgtaaatg

SEQ ID NO: 8964 - DNA, 20 bp, Artificial Sequence
  Synthetic polynucleotide
gcgtgggcacgggcagtgag

SEQ ID NO: 8965 - DNA, 20 bp, Artificial Sequence
  Synthetic polynucleotide
taccgaggtgagcagaggca

SEQ ID NO: 8966 - DNA, 20 bp, Artificial Sequence
  Synthetic polynucleotide
tgagcgagcgcaggcagcgc

SEQ ID NO: 8967 - DNA, 20 bp, Artificial Sequence
  Synthetic polynucleotide
gcgctgctgctgctgcttgc

SEQ ID NO: 8968 - DNA, 20 bp, Artificial Sequence
  Synthetic polynucleotide
ccggggtccaggcagcaggc

SEQ ID NO: 8969 - DNA, 20 bp, Artificial Sequence
  Synthetic polynucleotide
tcagactcaggatggatgga

SEQ ID NO: 8970 - DNA, 20 bp, Artificial Sequence
  Synthetic polynucleotide
caggaacagcaggagggagc

SEQ ID NO: 8971 - DNA, 20 bp, Artificial Sequence
  Synthetic polynucleotide
aggatgagatgctgcggcgg

SEQ ID NO: 8972 - DNA, 20 bp, Artificial Sequence
  Synthetic polynucleotide
tgtggagagaaactggtggg

SEQ ID NO: 8973 - DNA, 20 bp, Artificial Sequence
  Synthetic polynucleotide
ctccagcccgggtcggcggg

SEQ ID NO: 8974 - DNA, 20 bp, Artificial Sequence
  Synthetic polynucleotide
tgggcggcggcggcgcggcg

SEQ ID NO: 8975 - DNA, 20 bp, Artificial Sequence
  Synthetic polynucleotide
caggatgccgactggccagc

SEQ ID NO: 8976 - DNA, 20 bp, Artificial Sequence
  Synthetic polynucleotide
cgctcatagagtaaactaac

SEQ ID NO: 8977 - DNA, 20 bp, Artificial Sequence
  Synthetic polynucleotide
ggcaggggacgcccggctcg

SEQ ID NO: 8978 - DNA, 20 bp, Artificial Sequence
  Synthetic polynucleotide
aaggcggaatggtggtggag

SEQ ID NO: 8979 - DNA, 20 bp, Artificial Sequence
  Synthetic polynucleotide
gtatgggcggggccagggcg

SEQ ID NO: 8980 - DNA, 20 bp, Artificial Sequence
  Synthetic polynucleotide
gtggtcggaggagacgtagg

SEQ ID NO: 8981 - DNA, 20 bp, Artificial Sequence
  Synthetic polynucleotide
ggtgggggtgcggcggaggt

SEQ ID NO: 8982 - DNA, 55 bp, Artificial Sequence; identical to SEQ ID NO: 7522
  Synthetic polynucleotide

SEQ ID NO: 8983 - DNA, 55 bp, Artificial Sequence; identical to SEQ ID NO: 7469
  Synthetic polynucleotide

SEQ ID NO: 8984 - DNA, 55 bp, Artificial Sequence; identical to SEQ ID NO: 7950
  Synthetic polynucleotide

SEQ ID NO: 8985 - DNA, 55 bp, Artificial Sequence; identical to SEQ ID NO: 6733
  Synthetic polynucleotide

SEQ ID NO: 8986 - DNA, 55 bp, Artificial Sequence; identical to SEQ ID NO: 7603
  Synthetic polynucleotide

SEQ ID NO: 8987 - DNA, 55 bp, Artificial Sequence; identical to SEQ ID NO: 7266
  Synthetic polynucleotide

SEQ ID NO: 8988 - DNA, 55 bp, Artificial Sequence; identical to SEQ ID NO: 6853
  Synthetic polynucleotide

SEQ ID NO: 8989 - DNA, 55 bp, Artificial Sequence; identical to SEQ ID NO: 7788
  Synthetic polynucleotide

SEQ ID NO: 8990 - DNA, 55 bp, Artificial Sequence; identical to SEQ ID NO: 7437
  Synthetic polynucleotide

SEQ ID NO: 8991 - DNA, 55 bp, Artificial Sequence; identical to SEQ ID NO: 7911
  Synthetic polynucleotide

SEQ ID NO: 8992 - DNA, 55 bp, Artificial Sequence; identical to SEQ ID NO: 6799
  Synthetic polynucleotide

SEQ ID NO: 8993 - DNA, 55 bp, Artificial Sequence; identical to SEQ ID NO: 7932
  Synthetic polynucleotide

SEQ ID NO: 8994 - DNA, 55 bp, Artificial Sequence; identical to SEQ ID NO: 7433
  Synthetic polynucleotide

SEQ ID NO: 8995 - DNA, 55 bp, Artificial Sequence; identical to SEQ ID NO: 6836
  Synthetic polynucleotide

SEQ ID NO: 8996 - DNA, 55 bp, Artificial Sequence; identical to SEQ ID NO: 7781
  Synthetic polynucleotide

SEQ ID NO: 8997 - DNA, 55 bp, Artificial Sequence; identical to SEQ ID NO: 7936
  Synthetic polynucleotide

SEQ ID NO: 8998 - DNA, 55 bp, Artificial Sequence; identical to SEQ ID NO: 8032
  Synthetic polynucleotide

SEQ ID NO: 8999 - DNA, 55 bp, Artificial Sequence; identical to SEQ ID NO: 6823
  Synthetic polynucleotide

SEQ ID NO: 9000 - DNA, 55 bp, Artificial Sequence; identical to SEQ ID NO: 7262
  Synthetic polynucleotide

SEQ ID NO: 9001 - DNA, 55 bp, Artificial Sequence; identical to SEQ ID NO: 8010
  Synthetic polynucleotide

SEQ ID NO: 9002 - DNA, 55 bp, Artificial Sequence; identical to SEQ ID NO: 7984
  Synthetic polynucleotide

SEQ ID NO: 9003 - DNA, 55 bp, Artificial Sequence; identical to SEQ ID NO: 6734
  Synthetic polynucleotide

SEQ ID NO: 9004 - DNA, 55 bp, Artificial Sequence; identical to SEQ ID NO: 7173
  Synthetic polynucleotide

SEQ ID NO: 9005 - DNA, 55 bp, Artificial Sequence; identical to SEQ ID NO: 8059
  Synthetic polynucleotide

SEQ ID NO: 9006 - DNA, 55 bp, Artificial Sequence; identical to SEQ ID NO: 7299
  Synthetic polynucleotide

SEQ ID NO: 9007 - DNA, 55 bp, Artificial Sequence; identical to SEQ ID NO: 6979
  Synthetic polynucleotide

SEQ ID NO: 9008 - DNA, 55 bp, Artificial Sequence; identical to SEQ ID NO: 7370
  Synthetic polynucleotide

SEQ ID NO: 9009 - DNA, 55 bp, Artificial Sequence; identical to SEQ ID NO: 7742
  Synthetic polynucleotide

SEQ ID NO: 9010 - DNA, 55 bp, Artificial Sequence; identical to SEQ ID NO: 8041
  Synthetic polynucleotide

SEQ ID NO: 9011 - DNA, 55 bp, Artificial Sequence; identical to SEQ ID NO: 7345
  Synthetic polynucleotide

SEQ ID NO: 9012 - DNA, 55 bp, Artificial Sequence; identical to SEQ ID NO: 7471
  Synthetic polynucleotide

SEQ ID NO: 9013 - DNA, 55 bp, Artificial Sequence; identical to SEQ ID NO: 7257
  Synthetic polynucleotide

SEQ ID NO: 9014 - DNA, 55 bp, Artificial Sequence; identical to SEQ ID NO: 7107
  Synthetic polynucleotide

SEQ ID NO: 9015 - DNA, 55 bp, Artificial Sequence; identical to SEQ ID NO: 7047
  Synthetic polynucleotide

SEQ ID NO: 9016 - DNA, 55 bp, Artificial Sequence; identical to SEQ ID NO: 7341
  Synthetic polynucleotide

SEQ ID NO: 9017 - DNA, 55 bp, Artificial Sequence; identical to SEQ ID NO: 7930
  Synthetic polynucleotide

SEQ ID NO: 9018 - DNA, 55 bp, Artificial Sequence; identical to SEQ ID NO: 7977
  Synthetic polynucleotide

SEQ ID NO: 9019 - DNA, 55 bp, Artificial Sequence; identical to SEQ ID NO: 8060
  Synthetic polynucleotide

SEQ ID NO: 9020 - DNA, 55 bp, Artificial Sequence; identical to SEQ ID NO: 6817
  Synthetic polynucleotide

SEQ ID NO: 9021 - DNA, 55 bp, Artificial Sequence; identical to SEQ ID NO: 6864
  Synthetic polynucleotide

SEQ ID NO: 9022 - DNA, 55 bp, Artificial Sequence; identical to SEQ ID NO: 8018
  Synthetic polynucleotide

SEQ ID NO: 9023 - DNA, 55 bp, Artificial Sequence; identical to SEQ ID NO: 7910
  Synthetic polynucleotide

SEQ ID NO: 9024 - DNA, 55 bp, Artificial Sequence; identical to SEQ ID NO: 6785
  Synthetic polynucleotide

SEQ ID NO: 9025 - DNA, 55 bp, Artificial Sequence; identical to SEQ ID NO: 6646
  Synthetic polynucleotide

SEQ ID NO: 9026 - DNA, 55 bp, Artificial Sequence; identical to SEQ ID NO: 6641
  Synthetic polynucleotide

SEQ ID NO: 9027 - DNA, 55 bp, Artificial Sequence; identical to SEQ ID NO: 7533
  Synthetic polynucleotide

SEQ ID NO: 9028 - DNA, 55 bp, Artificial Sequence; identical to SEQ ID NO: 6861
  Synthetic polynucleotide

SEQ ID NO: 9029 - DNA, 55 bp, Artificial Sequence; identical to SEQ ID NO: 7315
  Synthetic polynucleotide

SEQ ID NO: 9030 - DNA, 55 bp, Artificial Sequence; identical to SEQ ID NO: 8091
  Synthetic polynucleotide

SEQ ID NO: 9031 - DNA, 55 bp, Artificial Sequence; identical to SEQ ID NO: 7985
  Synthetic polynucleotide

SEQ ID NO: 9032 - DNA, 55 bp, Artificial Sequence; identical to SEQ ID NO: 7188
  Synthetic polynucleotide

SEQ ID NO: 9033 - DNA, 55 bp, Artificial Sequence; identical to SEQ ID NO: 6717
  Synthetic polynucleotide

SEQ ID NO: 9034 - DNA, 55 bp, Artificial Sequence; identical to SEQ ID NO: 6898
  Synthetic polynucleotide

SEQ ID NO: 9035 - DNA, 55 bp, Artificial Sequence; identical to SEQ ID NO: 6988
  Synthetic polynucleotide

SEQ ID NO: 9036 - DNA, 55 bp, Artificial Sequence; identical to SEQ ID NO: 6855
  Synthetic polynucleotide

SEQ ID NO: 9037 - DNA, 55 bp, Artificial Sequence; identical to SEQ ID NO: 7458
  Synthetic polynucleotide

SEQ ID NO: 9038 - DNA, 55 bp, Artificial Sequence; identical to SEQ ID NO: 7317
  Synthetic polynucleotide

SEQ ID NO: 9039 - DNA, 55 bp, Artificial Sequence; identical to SEQ ID NO: 6643
  Synthetic polynucleotide

SEQ ID NO: 9040 - DNA, 55 bp, Artificial Sequence; identical to SEQ ID NO: 7644
  Synthetic polynucleotide

SEQ ID NO: 9041 - DNA, 55 bp, Artificial Sequence; identical to SEQ ID NO: 7752
  Synthetic polynucleotide

SEQ ID NO: 9042 - DNA, 55 bp, Artificial Sequence; identical to SEQ ID NO: 7130
  Synthetic polynucleotide

SEQ ID NO: 9043 - DNA, 55 bp, Artificial Sequence; identical to SEQ ID NO: 7436
  Synthetic polynucleotide

SEQ ID NO: 9044 - DNA, 55 bp, Artificial Sequence; identical to SEQ ID NO: 6697
  Synthetic polynucleotide

SEQ ID NO: 9045 - DNA, 55 bp, Artificial Sequence; identical to SEQ ID NO: 7383
  Synthetic polynucleotide

SEQ ID NO: 9046 - DNA, 55 bp, Artificial Sequence; identical to SEQ ID NO: 7260
  Synthetic polynucleotide

SEQ ID NO: 9047 - DNA, 55 bp, Artificial Sequence; identical to SEQ ID NO: 7726
  Synthetic polynucleotide

SEQ ID NO: 9048 - DNA, 55 bp, Artificial Sequence; identical to SEQ ID NO: 7923
  Synthetic polynucleotide

SEQ ID NO: 9049 - DNA, 55 bp, Artificial Sequence; identical to SEQ ID NO: 8111
  Synthetic polynucleotide

SEQ ID NO: 9050 - DNA, 55 bp, Artificial Sequence; identical to SEQ ID NO: 7117
  Synthetic polynucleotide

SEQ ID NO: 9051 - DNA, 55 bp, Artificial Sequence; identical to SEQ ID NO: 7152
  Synthetic polynucleotide

SEQ ID NO: 9052 - DNA, 55 bp, Artificial Sequence; identical to SEQ ID NO: 7495
  Synthetic polynucleotide

SEQ ID NO: 9053 - DNA, 55 bp, Artificial Sequence; identical to SEQ ID NO: 7229
  Synthetic polynucleotide

SEQ ID NO: 9054 - DNA, 55 bp, Artificial Sequence; identical to SEQ ID NO: 7634
  Synthetic polynucleotide

SEQ ID NO: 9055 - DNA, 55 bp, Artificial Sequence; identical to SEQ ID NO: 7553
  Synthetic polynucleotide

SEQ ID NO: 9056 - DNA, 55 bp, Artificial Sequence; identical to SEQ ID NO: 6876
  Synthetic polynucleotide

SEQ ID NO: 9057 - DNA, 55 bp, Artificial Sequence; identical to SEQ ID NO: 7637
  Synthetic polynucleotide

SEQ ID NO: 9058 - DNA, 55 bp, Artificial Sequence; identical to SEQ ID NO: 7386
  Synthetic polynucleotide

SEQ ID NO: 9059 - DNA, 55 bp, Artificial Sequence; identical to SEQ ID NO: 6995
  Synthetic polynucleotide

SEQ ID NO: 9060 - DNA, 55 bp, Artificial Sequence; identical to SEQ ID NO: 7384
  Synthetic polynucleotide

SEQ ID NO: 9061 - DNA, 55 bp, Artificial Sequence; identical to SEQ ID NO: 8049
  Synthetic polynucleotide

SEQ ID NO: 9062 - DNA, 55 bp, Artificial Sequence; identical to SEQ ID NO: 6625
  Synthetic polynucleotide

SEQ ID NO: 9063 - DNA, 55 bp, Artificial Sequence; identical to SEQ ID NO: 7003
  Synthetic polynucleotide

SEQ ID NO: 9064 - DNA, 55 bp, Artificial Sequence; identical to SEQ ID NO: 7693
  Synthetic polynucleotide

SEQ ID NO: 9065 - DNA, 55 bp, Artificial Sequence; identical to SEQ ID NO: 7645
  Synthetic polynucleotide

SEQ ID NO: 9066 - DNA, 55 bp, Artificial Sequence; identical to SEQ ID NO: 7869
  Synthetic polynucleotide

SEQ ID NO: 9067 - DNA, 55 bp, Artificial Sequence; identical to SEQ ID NO: 6738
  Synthetic polynucleotide

SEQ ID NO: 9068 - DNA, 55 bp, Artificial Sequence; identical to SEQ ID NO: 8000
  Synthetic polynucleotide

SEQ ID NO: 9069 - DNA, 55 bp, Artificial Sequence; identical to SEQ ID NO: 7653
  Synthetic polynucleotide

SEQ ID NO: 9070 - DNA, 55 bp, Artificial Sequence; identical to SEQ ID NO: 6532
  Synthetic polynucleotide

SEQ ID NO: 9071 - DNA, 55 bp, Artificial Sequence; identical to SEQ ID NO: 7953
  Synthetic polynucleotide

SEQ ID NO: 9072 - DNA, 55 bp, Artificial Sequence; identical to SEQ ID NO: 7694
  Synthetic polynucleotide

SEQ ID NO: 9073 - DNA, 55 bp, Artificial Sequence; identical to SEQ ID NO: 7806
  Synthetic polynucleotide

SEQ ID NO: 9074 - DNA, 55 bp, Artificial Sequence; identical to SEQ ID NO: 6745
  Synthetic polynucleotide

SEQ ID NO: 9075 - DNA, 55 bp, Artificial Sequence; identical to SEQ ID NO: 7952
  Synthetic polynucleotide

SEQ ID NO: 9076 - DNA, 55 bp, Artificial Sequence; identical to SEQ ID NO: 6639
  Synthetic polynucleotide

SEQ ID NO: 9077 - DNA, 55 bp, Artificial Sequence; identical to SEQ ID NO: 8034
  Synthetic polynucleotide

SEQ ID NO: 9078 - DNA, 55 bp, Artificial Sequence; identical to SEQ ID NO: 6567
  Synthetic polynucleotide

SEQ ID NO: 9079 - DNA, 55 bp, Artificial Sequence; identical to SEQ ID NO: 6833
  Synthetic polynucleotide

SEQ ID NO: 9080 - DNA, 55 bp, Artificial Sequence; identical to SEQ ID NO: 8044
  Synthetic polynucleotide

SEQ ID NO: 9081 - DNA, 55 bp, Artificial Sequence; identical to SEQ ID NO: 7795
  Synthetic polynucleotide

SEQ ID NO: 9082 - DNA, 55 bp, Artificial Sequence; identical to SEQ ID NO: 7901
  Synthetic polynucleotide

SEQ ID NO: 9083 - DNA, 55 bp, Artificial Sequence; identical to SEQ ID NO: 7969
  Synthetic polynucleotide

SEQ ID NO: 9084 - DNA, 55 bp, Artificial Sequence; identical to SEQ ID NO: 8031
  Synthetic polynucleotide

SEQ ID NO: 9085 - DNA, 55 bp, Artificial Sequence; identical to SEQ ID NO: 7457
  Synthetic polynucleotide

SEQ ID NO: 9086 - DNA, 55 bp, Artificial Sequence; identical to SEQ ID NO: 6778
  Synthetic polynucleotide

SEQ ID NO: 9087 - DNA, 55 bp, Artificial Sequence; identical to SEQ ID NO: 8074
  Synthetic polynucleotide

SEQ ID NO: 9088 - DNA, 55 bp, Artificial Sequence; identical to SEQ ID NO: 7126
  Synthetic polynucleotide

SEQ ID NO: 9089 - DNA, 55 bp, Artificial Sequence; identical to SEQ ID NO: 6776
  Synthetic polynucleotide

SEQ ID NO: 9090 - DNA, 55 bp, Artificial Sequence; identical to SEQ ID NO: 6953
  Synthetic polynucleotide

SEQ ID NO: 9091 - DNA, 55 bp, Artificial Sequence; identical to SEQ ID NO: 7829
  Synthetic polynucleotide

SEQ ID NO: 9092 - DNA, 55 bp, Artificial Sequence; identical to SEQ ID NO: 7015
  Synthetic polynucleotide

SEQ ID NO: 9093 - DNA, 55 bp, Artificial Sequence; identical to SEQ ID NO: 7415
  Synthetic polynucleotide

SEQ ID NO: 9094 - DNA, 55 bp, Artificial Sequence; identical to SEQ ID NO: 7625
  Synthetic polynucleotide

SEQ ID NO: 9095 - DNA, 55 bp, Artificial Sequence; identical to SEQ ID NO: 7897
  Synthetic polynucleotide

SEQ ID NO: 9096 - DNA, 55 bp, Artificial Sequence; identical to SEQ ID NO: 7498
  Synthetic polynucleotide

SEQ ID NO: 9097 - DNA, 55 bp, Artificial Sequence; identical to SEQ ID NO: 6991
  Synthetic polynucleotide

SEQ ID NO: 9098 - DNA, 55 bp, Artificial Sequence; identical to SEQ ID NO: 6894
  Synthetic polynucleotide

SEQ ID NO: 9099 - DNA, 55 bp, Artificial Sequence; identical to SEQ ID NO: 7134
  Synthetic polynucleotide

SEQ ID NO: 9100 - DNA, 55 bp, Artificial Sequence; identical to SEQ ID NO: 6822
  Synthetic polynucleotide

SEQ ID NO: 9101 - DNA, 55 bp, Artificial Sequence; identical to SEQ ID NO: 6931
  Synthetic polynucleotide

SEQ ID NO: 9102 - DNA, 55 bp, Artificial Sequence; identical to SEQ ID NO: 7920
  Synthetic polynucleotide

SEQ ID NO: 9103 - DNA, 55 bp, Artificial Sequence; identical to SEQ ID NO: 7425
  Synthetic polynucleotide

SEQ ID NO: 9104 - DNA, 55 bp, Artificial Sequence; identical to SEQ ID NO: 6918
  Synthetic polynucleotide

SEQ ID NO: 9105 - DNA, 55 bp, Artificial Sequence; identical to SEQ ID NO: 8042
  Synthetic polynucleotide

SEQ ID NO: 9106 - DNA, 55 bp, Artificial Sequence; identical to SEQ ID NO: 7034
  Synthetic polynucleotide

SEQ ID NO: 9107 - DNA, 55 bp, Artificial Sequence; identical to SEQ ID NO: 8086
  Synthetic polynucleotide

SEQ ID NO: 9108 - DNA, 55 bp, Artificial Sequence; identical to SEQ ID NO: 6993
  Synthetic polynucleotide

SEQ ID NO: 9109 - DNA, 55 bp, Artificial Sequence; identical to SEQ ID NO: 7371
  Synthetic polynucleotide

SEQ ID NO: 9110 - DNA, 55 bp, Artificial Sequence; identical to SEQ ID NO: 6537
  Synthetic polynucleotide

SEQ ID NO: 9111 - DNA, 55 bp, Artificial Sequence; identical to SEQ ID NO: 8033
  Synthetic polynucleotide

SEQ ID NO: 9112 - DNA, 55 bp, Artificial Sequence; identical to SEQ ID NO: 7416
  Synthetic polynucleotide

SEQ ID NO: 9113 - DNA, 55 bp, Artificial Sequence; identical to SEQ ID NO: 7161
  Synthetic polynucleotide

SEQ ID NO: 9114 - DNA, 55 bp, Artificial Sequence; identical to SEQ ID NO: 7349
  Synthetic polynucleotide

SEQ ID NO: 9115 - DNA, 55 bp, Artificial Sequence; identical to SEQ ID NO: 7679
  Synthetic polynucleotide

SEQ ID NO: 9116 - DNA, 55 bp, Artificial Sequence; identical to SEQ ID NO: 7898
  Synthetic polynucleotide

SEQ ID NO: 9117 - DNA, 55 bp, Artificial Sequence; identical to SEQ ID NO: 6721
  Synthetic polynucleotide

SEQ ID NO: 9118 - DNA, 55 bp, Artificial Sequence; identical to SEQ ID NO: 7046
  Synthetic polynucleotide

SEQ ID NO: 9119 - DNA, 55 bp, Artificial Sequence; identical to SEQ ID NO: 6701
  Synthetic polynucleotide

SEQ ID NO: 9120 - DNA, 55 bp, Artificial Sequence; identical to SEQ ID NO: 7973
  Synthetic polynucleotide

SEQ ID NO: 9121 - DNA, 55 bp, Artificial Sequence; identical to SEQ ID NO: 7861
  Synthetic polynucleotide

SEQ ID NO: 9122 - DNA, 55 bp, Artificial Sequence; identical to SEQ ID NO: 7387
  Synthetic polynucleotide

SEQ ID NO: 9123 - DNA, 55 bp, Artificial Sequence; identical to SEQ ID NO: 7878
  Synthetic polynucleotide

SEQ ID NO: 9124 - DNA, 55 bp, Artificial Sequence; identical to SEQ ID NO: 7274
  Synthetic polynucleotide

SEQ ID NO: 9125 - DNA, 55 bp, Artificial Sequence; identical to SEQ ID NO: 6682
  Synthetic polynucleotide

SEQ ID NO: 9126 - DNA, 55 bp, Artificial Sequence; identical to SEQ ID NO: 7481
  Synthetic polynucleotide

SEQ ID NO: 9127 - DNA, 55 bp, Artificial Sequence; identical to SEQ ID NO: 7276
  Synthetic polynucleotide

SEQ ID NO: 9128 - DNA, 55 bp, Artificial Sequence; identical to SEQ ID NO: 7404
  Synthetic polynucleotide

SEQ ID NO: 9129 - DNA, 55 bp, Artificial Sequence; identical to SEQ ID NO: 7026
  Synthetic polynucleotide

SEQ ID NO: 9130 - DNA, 55 bp, Artificial Sequence; identical to SEQ ID NO: 7114
  Synthetic polynucleotide

SEQ ID NO: 9131 - DNA, 55 bp, Artificial Sequence; identical to SEQ ID NO: 7766
  Synthetic polynucleotide

SEQ ID NO: 9132 - DNA, 55 bp, Artificial Sequence; identical to SEQ ID NO: 7787
  Synthetic polynucleotide

SEQ ID NO: 9133 - DNA, 55 bp, Artificial Sequence; identical to SEQ ID NO: 6631
  Synthetic polynucleotide

SEQ ID NO: 9134 - DNA, 55 bp, Artificial Sequence; identical to SEQ ID NO: 6858
  Synthetic polynucleotide

SEQ ID NO: 9135 - DNA, 55 bp, Artificial Sequence; identical to SEQ ID NO: 6596
  Synthetic polynucleotide

SEQ ID NO: 9136 - DNA, 55 bp, Artificial Sequence; identical to SEQ ID NO: 7316
  Synthetic polynucleotide

SEQ ID NO: 9137 - DNA, 55 bp, Artificial Sequence; identical to SEQ ID NO: 7169
  Synthetic polynucleotide

SEQ ID NO: 9138 - DNA, 55 bp, Artificial Sequence; identical to SEQ ID NO: 6587
  Synthetic polynucleotide

SEQ ID NO: 9139 - DNA, 55 bp, Artificial Sequence; identical to SEQ ID NO: 7853
  Synthetic polynucleotide

SEQ ID NO: 9140 - DNA, 55 bp, Artificial Sequence; identical to SEQ ID NO: 7926
  Synthetic polynucleotide

SEQ ID NO: 9141 - DNA, 55 bp, Artificial Sequence; identical to SEQ ID NO: 6935
  Synthetic polynucleotide

SEQ ID NO: 9142 - DNA, 55 bp, Artificial Sequence; identical to SEQ ID NO: 7669
  Synthetic polynucleotide

SEQ ID NO: 9143 - DNA, 55 bp, Artificial Sequence; identical to SEQ ID NO: 7978
  Synthetic polynucleotide

SEQ ID NO: 9144 - DNA, 55 bp, Artificial Sequence; identical to SEQ ID NO: 6612
  Synthetic polynucleotide

SEQ ID NO: 9145 - DNA, 55 bp, Artificial Sequence; identical to SEQ ID NO: 8069
  Synthetic polynucleotide

SEQ ID NO: 9146 - DNA, 55 bp, Artificial Sequence; identical to SEQ ID NO: 6990
  Synthetic polynucleotide

SEQ ID NO: 9147 - DNA, 55 bp, Artificial Sequence; identical to SEQ ID NO: 6930
  Synthetic polynucleotide

SEQ ID NO: 9148 - DNA, 55 bp, Artificial Sequence; identical to SEQ ID NO: 7873
  Synthetic polynucleotide

SEQ ID NO: 9149 - DNA, 55 bp, Artificial Sequence; identical to SEQ ID NO: 7942
  Synthetic polynucleotide

SEQ ID NO: 9150 - DNA, 55 bp, Artificial Sequence; identical to SEQ ID NO: 6620
  Synthetic polynucleotide

SEQ ID NO: 9151 - DNA, 55 bp, Artificial Sequence; identical to SEQ ID NO: 6713
  Synthetic polynucleotide

SEQ ID NO: 9152 - DNA, 55 bp, Artificial Sequence; identical to SEQ ID NO: 7777
  Synthetic polynucleotide

SEQ ID NO: 9153 - DNA, 55 bp, Artificial Sequence; identical to SEQ ID NO: 7557
  Synthetic polynucleotide

SEQ ID NO: 9154 - DNA, 55 bp, Artificial Sequence; identical to SEQ ID NO: 7303
  Synthetic polynucleotide

SEQ ID NO: 9155 - DNA, 55 bp, Artificial Sequence; identical to SEQ ID NO: 7432
  Synthetic polynucleotide

SEQ ID NO: 9156 - DNA, 55 bp, Artificial Sequence; identical to SEQ ID NO: 8116
  Synthetic polynucleotide

SEQ ID NO: 9157 - DNA, 55 bp, Artificial Sequence; identical to SEQ ID NO: 7808
  Synthetic polynucleotide

SEQ ID NO: 9158 - DNA, 55 bp, Artificial Sequence; identical to SEQ ID NO: 7665
  Synthetic polynucleotide

SEQ ID NO: 9159 - DNA, 55 bp, Artificial Sequence; identical to SEQ ID NO: 7079
  Synthetic polynucleotide

SEQ ID NO: 9160 - DNA, 55 bp, Artificial Sequence; identical to SEQ ID NO: 7602
  Synthetic polynucleotide

SEQ ID NO: 9161 - DNA, 55 bp, Artificial Sequence; identical to SEQ ID NO: 6714
  Synthetic polynucleotide

SEQ ID NO: 9162 - DNA, 55 bp, Artificial Sequence; identical to SEQ ID NO: 6751
  Synthetic polynucleotide

SEQ ID NO: 9163 - DNA, 55 bp, Artificial Sequence; identical to SEQ ID NO: 6936
  Synthetic polynucleotide

SEQ ID NO: 9164 - DNA, 55 bp, Artificial Sequence; identical to SEQ ID NO: 8088
  Synthetic polynucleotide

SEQ ID NO: 9165 - DNA, 55 bp, Artificial Sequence; identical to SEQ ID NO: 8027
  Synthetic polynucleotide

SEQ ID NO: 9166 - DNA, 55 bp, Artificial Sequence; identical to SEQ ID NO: 7097
  Synthetic polynucleotide

SEQ ID NO: 9167 - DNA, 55 bp, Artificial Sequence; identical to SEQ ID NO: 7253
  Synthetic polynucleotide

SEQ ID NO: 9168 - DNA, 55 bp, Artificial Sequence; identical to SEQ ID NO: 7140
  Synthetic polynucleotide

SEQ ID NO: 9169 - DNA, 55 bp, Artificial Sequence; identical to SEQ ID NO: 7880
  Synthetic polynucleotide

SEQ ID NO: 9170 - DNA, 55 bp, Artificial Sequence; identical to SEQ ID NO: 6768
  Synthetic polynucleotide

SEQ ID NO: 9171 - DNA, 55 bp, Artificial Sequence; identical to SEQ ID NO: 6914
  Synthetic polynucleotide

SEQ ID NO: 9172 - DNA, 55 bp, Artificial Sequence; identical to SEQ ID NO: 7905
  Synthetic polynucleotide

SEQ ID NO: 9173 - DNA, 55 bp, Artificial Sequence; identical to SEQ ID NO: 7980
  Synthetic polynucleotide

SEQ ID NO: 9174 - DNA, 55 bp, Artificial Sequence; identical to SEQ ID NO: 7879
  Synthetic polynucleotide

SEQ ID NO: 9175 - DNA, 55 bp, Artificial Sequence; identical to SEQ ID NO: 7928
  Synthetic polynucleotide

SEQ ID NO: 9176 - DNA, 55 bp, Artificial Sequence; identical to SEQ ID NO: 6565
  Synthetic polynucleotide

SEQ ID NO: 9177 - DNA, 55 bp, Artificial Sequence; identical to SEQ ID NO: 8092
  Synthetic polynucleotide

SEQ ID NO: 9178 - DNA, 55 bp, Artificial Sequence; identical to SEQ ID NO: 7674
  Synthetic polynucleotide

SEQ ID NO: 9179 - DNA, 55 bp, Artificial Sequence; identical to SEQ ID NO: 7967
  Synthetic polynucleotide

SEQ ID NO: 9180 - DNA, 55 bp, Artificial Sequence; identical to SEQ ID NO: 7856
  Synthetic polynucleotide

SEQ ID NO: 9181 - DNA, 55 bp, Artificial Sequence; identical to SEQ ID NO: 7857
  Synthetic polynucleotide

SEQ ID NO: 9182 - DNA, 55 bp, Artificial Sequence; identical to SEQ ID NO: 7649
  Synthetic polynucleotide

SEQ ID NO: 9183 - DNA, 55 bp, Artificial Sequence; identical to SEQ ID NO: 7624
  Synthetic polynucleotide

SEQ ID NO: 9184 - DNA, 55 bp, Artificial Sequence; identical to SEQ ID NO: 8082
  Synthetic polynucleotide

SEQ ID NO: 9185 - DNA, 55 bp, Artificial Sequence; identical to SEQ ID NO: 7486
  Synthetic polynucleotide

SEQ ID NO: 9186 - DNA, 55 bp, Artificial Sequence; identical to SEQ ID NO: 7855
  Synthetic polynucleotide

SEQ ID NO: 9187 - DNA, 55 bp, Artificial Sequence; identical to SEQ ID NO: 7803
  Synthetic polynucleotide

SEQ ID NO: 9188 - DNA, 55 bp, Artificial Sequence; identical to SEQ ID NO: 7678
  Synthetic polynucleotide

SEQ ID NO: 9189 - DNA, 55 bp, Artificial Sequence; identical to SEQ ID NO: 7629
  Synthetic polynucleotide

SEQ ID NO: 9190 - DNA, 55 bp, Artificial Sequence; identical to SEQ ID NO: 7746
  Synthetic polynucleotide

SEQ ID NO: 9191 - DNA, 55 bp, Artificial Sequence; identical to SEQ ID NO: 7238
  Synthetic polynucleotide

SEQ ID NO: 9192 - DNA, 55 bp, Artificial Sequence; identical to SEQ ID NO: 7005
  Synthetic polynucleotide

SEQ ID NO: 9193 - DNA, 55 bp, Artificial Sequence; identical to SEQ ID NO: 7862
  Synthetic polynucleotide

SEQ ID NO: 9194 - DNA, 55 bp, Artificial Sequence; identical to SEQ ID NO: 7124
  Synthetic polynucleotide

SEQ ID NO: 9195 - DNA, 55 bp, Artificial Sequence; identical to SEQ ID NO: 6900
  Synthetic polynucleotide

SEQ ID NO: 9196 - DNA, 55 bp, Artificial Sequence; identical to SEQ ID NO: 7938
  Synthetic polynucleotide

SEQ ID NO: 9197 - DNA, 55 bp, Artificial Sequence; identical to SEQ ID NO: 7975
  Synthetic polynucleotide

SEQ ID NO: 9198 - DNA, 55 bp, Artificial Sequence; identical to SEQ ID NO: 7534
  Synthetic polynucleotide

SEQ ID NO: 9199 - DNA, 55 bp, Artificial Sequence; identical to SEQ ID NO: 8030
  Synthetic polynucleotide

SEQ ID NO: 9200 - DNA, 55 bp, Artificial Sequence; identical to SEQ ID NO: 7802
  Synthetic polynucleotide

SEQ ID NO: 9201 - DNA, 55 bp, Artificial Sequence; identical to SEQ ID NO: 7136
  Synthetic polynucleotide

SEQ ID NO: 9202 - DNA, 55 bp, Artificial Sequence; identical to SEQ ID NO: 7414
  Synthetic polynucleotide

SEQ ID NO: 9203 - DNA, 55 bp, Artificial Sequence; identical to SEQ ID NO: 8087
  Synthetic polynucleotide

SEQ ID NO: 9204 - DNA, 55 bp, Artificial Sequence; identical to SEQ ID NO: 7633
  Synthetic polynucleotide

SEQ ID NO: 9205 - DNA, 55 bp, Artificial Sequence; identical to SEQ ID NO: 7943
  Synthetic polynucleotide

SEQ ID NO: 9206 - DNA, 55 bp, Artificial Sequence; identical to SEQ ID NO: 8058
  Synthetic polynucleotide

SEQ ID NO: 9207 - DNA, 55 bp, Artificial Sequence; identical to SEQ ID NO: 7213
  Synthetic polynucleotide

SEQ ID NO: 9208 - DNA, 55 bp, Artificial Sequence; identical to SEQ ID NO: 7301
  Synthetic polynucleotide

SEQ ID NO: 9209 - DNA, 55 bp, Artificial Sequence; identical to SEQ ID NO: 7411
  Synthetic polynucleotide

SEQ ID NO: 9210 - DNA, 55 bp, Artificial Sequence; identical to SEQ ID NO: 7421
  Synthetic polynucleotide

SEQ ID NO: 9211 - DNA, 55 bp, Artificial Sequence; identical to SEQ ID NO: 7583
  Synthetic polynucleotide

SEQ ID NO: 9212 - DNA, 55 bp, Artificial Sequence; identical to SEQ ID NO: 7994
  Synthetic polynucleotide

SEQ ID NO: 9213 - DNA, 55 bp, Artificial Sequence; identical to SEQ ID NO: 7207
  Synthetic polynucleotide

SEQ ID NO: 9214 - DNA, 55 bp, Artificial Sequence; identical to SEQ ID NO: 7631
  Synthetic polynucleotide

SEQ ID NO: 9215 - DNA, 55 bp, Artificial Sequence; identical to SEQ ID NO: 7212
  Synthetic polynucleotide

SEQ ID NO: 9216 - DNA, 55 bp, Artificial Sequence; identical to SEQ ID NO: 6879
  Synthetic polynucleotide

SEQ ID NO: 9217 - DNA, 55 bp, Artificial Sequence; identical to SEQ ID NO: 6569
  Synthetic polynucleotide

SEQ ID NO: 9218 - DNA, 55 bp, Artificial Sequence; identical to SEQ ID NO: 7972
  Synthetic polynucleotide

SEQ ID NO: 9219 - DNA, 55 bp, Artificial Sequence; identical to SEQ ID NO: 7313
  Synthetic polynucleotide

SEQ ID NO: 9220 - DNA, 55 bp, Artificial Sequence; identical to SEQ ID NO: 7852
  Synthetic polynucleotide

SEQ ID NO: 9221 - DNA, 55 bp, Artificial Sequence; identical to SEQ ID NO: 6795
  Synthetic polynucleotide

SEQ ID NO: 9222 - DNA, 55 bp, Artificial Sequence; identical to SEQ ID NO: 8015
  Synthetic polynucleotide

SEQ ID NO: 9223 - DNA, 55 bp, Artificial Sequence; identical to SEQ ID NO: 7948
  Synthetic polynucleotide

SEQ ID NO: 9224 - DNA, 55 bp, Artificial Sequence; identical to SEQ ID NO: 6662
  Synthetic polynucleotide

SEQ ID NO: 9225 - DNA, 55 bp, Artificial Sequence; identical to SEQ ID NO: 7847
  Synthetic polynucleotide

SEQ ID NO: 9226 - DNA, 55 bp, Artificial Sequence; identical to SEQ ID NO: 7067
  Synthetic polynucleotide

SEQ ID NO: 9227 - DNA, 55 bp, Artificial Sequence; identical to SEQ ID NO: 7555
  Synthetic polynucleotide

SEQ ID NO: 9228 - DNA, 55 bp, Artificial Sequence; identical to SEQ ID NO: 6977
  Synthetic polynucleotide

SEQ ID NO: 9229 - DNA, 55 bp, Artificial Sequence; identical to SEQ ID NO: 7538
  Synthetic polynucleotide

SEQ ID NO: 9230 - DNA, 55 bp, Artificial Sequence; identical to SEQ ID NO: 7043
  Synthetic polynucleotide

SEQ ID NO: 9231 - DNA, 55 bp, Artificial Sequence; identical to SEQ ID NO: 6921
  Synthetic polynucleotide

SEQ ID NO: 9232 - DNA, 55 bp, Artificial Sequence; identical to SEQ ID NO: 7374
  Synthetic polynucleotide

SEQ ID NO: 9233 - DNA, 55 bp, Artificial Sequence; identical to SEQ ID NO: 6622
  Synthetic polynucleotide

SEQ ID NO: 9234 - DNA, 55 bp, Artificial Sequence; identical to SEQ ID NO: 7727
  Synthetic polynucleotide

SEQ ID NO: 9235 - DNA, 55 bp, Artificial Sequence; identical to SEQ ID NO: 7435
  Synthetic polynucleotide

SEQ ID NO: 9236 - DNA, 55 bp, Artificial Sequence; identical to SEQ ID NO: 6838
  Synthetic polynucleotide

SEQ ID NO: 9237 - DNA, 55 bp, Artificial Sequence; identical to SEQ ID NO: 7283
  Synthetic polynucleotide

SEQ ID NO: 9238 - DNA, 55 bp, Artificial Sequence; identical to SEQ ID NO: 7427
  Synthetic polynucleotide

SEQ ID NO: 9239 - DNA, 55 bp, Artificial Sequence; identical to SEQ ID NO: 7929
  Synthetic polynucleotide

SEQ ID NO: 9240 - DNA, 55 bp, Artificial Sequence; identical to SEQ ID NO: 7568
  Synthetic polynucleotide

SEQ ID NO: 9241 - DNA, 55 bp, Artificial Sequence; identical to SEQ ID NO: 7699
  Synthetic polynucleotide

SEQ ID NO: 9242 - DNA, 55 bp, Artificial Sequence; identical to SEQ ID NO: 6851
  Synthetic polynucleotide

SEQ ID NO: 9243 - DNA, 55 bp, Artificial Sequence; identical to SEQ ID NO: 7143
  Synthetic polynucleotide

SEQ ID NO: 9244 - DNA, 55 bp, Artificial Sequence; identical to SEQ ID NO: 6614
  Synthetic polynucleotide

SEQ ID NO: 9245 - DNA, 55 bp, Artificial Sequence; identical to SEQ ID NO: 6736
  Synthetic polynucleotide

SEQ ID NO: 9246 - DNA, 55 bp, Artificial Sequence; identical to SEQ ID NO: 7473
  Synthetic polynucleotide

SEQ ID NO: 9247 - DNA, 55 bp, Artificial Sequence; identical to SEQ ID NO: 7974
  Synthetic polynucleotide

SEQ ID NO: 9248 - DNA, 55 bp, Artificial Sequence; identical to SEQ ID NO: 6551
  Synthetic polynucleotide

SEQ ID NO: 9249 - DNA, 55 bp, Artificial Sequence; identical to SEQ ID NO: 7668
  Synthetic polynucleotide

SEQ ID NO: 9250 - DNA, 55 bp, Artificial Sequence; identical to SEQ ID NO: 7749
  Synthetic polynucleotide

SEQ ID NO: 9251 - DNA, 55 bp, Artificial Sequence; identical to SEQ ID NO: 7449
  Synthetic polynucleotide

SEQ ID NO: 9252 - DNA, 55 bp, Artificial Sequence; identical to SEQ ID NO: 6555
  Synthetic polynucleotide

SEQ ID NO: 9253 - DNA, 55 bp, Artificial Sequence; identical to SEQ ID NO: 8047
  Synthetic polynucleotide

SEQ ID NO: 9254 - DNA, 55 bp, Artificial Sequence; identical to SEQ ID NO: 6982
  Synthetic polynucleotide

SEQ ID NO: 9255 - DNA, 55 bp, Artificial Sequence; identical to SEQ ID NO: 7395
  Synthetic polynucleotide

SEQ ID NO: 9256 - DNA, 55 bp, Artificial Sequence; identical to SEQ ID NO: 8107
  Synthetic polynucleotide

SEQ ID NO: 9257 - DNA, 55 bp, Artificial Sequence; identical to SEQ ID NO: 7323
  Synthetic polynucleotide

SEQ ID NO: 9258 - DNA, 55 bp, Artificial Sequence; identical to SEQ ID NO: 7770
  Synthetic polynucleotide

SEQ ID NO: 9259 - DNA, 55 bp, Artificial Sequence; identical to SEQ ID NO: 7560
  Synthetic polynucleotide

SEQ ID NO: 9260 - DNA, 55 bp, Artificial Sequence; identical to SEQ ID NO: 8093
  Synthetic polynucleotide

SEQ ID NO: 9261 - DNA, 55 bp, Artificial Sequence; identical to SEQ ID NO: 8105
  Synthetic polynucleotide

SEQ ID NO: 9262 - DNA, 55 bp, Artificial Sequence; identical to SEQ ID NO: 7956
  Synthetic polynucleotide

SEQ ID NO: 9263 - DNA, 55 bp, Artificial Sequence; identical to SEQ ID NO: 7366
  Synthetic polynucleotide

SEQ ID NO: 9264 - DNA, 55 bp, Artificial Sequence; identical to SEQ ID NO: 7255
  Synthetic polynucleotide

SEQ ID NO: 9265 - DNA, 55 bp, Artificial Sequence; identical to SEQ ID NO: 7459
  Synthetic polynucleotide

SEQ ID NO: 9266 - DNA, 55 bp, Artificial Sequence; identical to SEQ ID NO: 7614
  Synthetic polynucleotide

SEQ ID NO: 9267 - DNA, 55 bp, Artificial Sequence; identical to SEQ ID NO: 6764
  Synthetic polynucleotide

SEQ ID NO: 9268 - DNA, 55 bp, Artificial Sequence; identical to SEQ ID NO: 6874
  Synthetic polynucleotide

SEQ ID NO: 9269 - DNA, 55 bp, Artificial Sequence; identical to SEQ ID NO: 7243
  Synthetic polynucleotide

SEQ ID NO: 9270 - DNA, 55 bp, Artificial Sequence; identical to SEQ ID NO: 7810
  Synthetic polynucleotide

SEQ ID NO: 9271 - DNA, 55 bp, Artificial Sequence; identical to SEQ ID NO: 7941
  Synthetic polynucleotide

SEQ ID NO: 9272 - DNA, 55 bp, Artificial Sequence; identical to SEQ ID NO: 7413
  Synthetic polynucleotide

SEQ ID NO: 9273 - DNA, 55 bp, Artificial Sequence; identical to SEQ ID NO: 7348
  Synthetic polynucleotide

SEQ ID NO: 9274 - DNA, 55 bp, Artificial Sequence; identical to SEQ ID NO: 8004
  Synthetic polynucleotide

SEQ ID NO: 9275 - DNA, 55 bp, Artificial Sequence; identical to SEQ ID NO: 6961
  Synthetic polynucleotide

SEQ ID NO: 9276 - DNA, 55 bp, Artificial Sequence; identical to SEQ ID NO: 7115
  Synthetic polynucleotide

SEQ ID NO: 9277 - DNA, 55 bp, Artificial Sequence; identical to SEQ ID NO: 7297
  Synthetic polynucleotide

SEQ ID NO: 9278 - DNA, 55 bp, Artificial Sequence; identical to SEQ ID NO: 7049
  Synthetic polynucleotide

SEQ ID NO: 9279 - DNA, 55 bp, Artificial Sequence; identical to SEQ ID NO: 6871
  Synthetic polynucleotide

SEQ ID NO: 9280 - DNA, 55 bp, Artificial Sequence; identical to SEQ ID NO: 7171
  Synthetic polynucleotide

SEQ ID NO: 9281 - DNA, 55 bp, Artificial Sequence; identical to SEQ ID NO: 6577
  Synthetic polynucleotide

SEQ ID NO: 9282 - DNA, 55 bp, Artificial Sequence; identical to SEQ ID NO: 7444
  Synthetic polynucleotide

SEQ ID NO: 9283 - DNA, 55 bp, Artificial Sequence; identical to SEQ ID NO: 8090
  Synthetic polynucleotide

SEQ ID NO: 9284 - DNA, 55 bp, Artificial Sequence; identical to SEQ ID NO: 7006
  Synthetic polynucleotide

SEQ ID NO: 9285 - DNA, 55 bp, Artificial Sequence; identical to SEQ ID NO: 7628
  Synthetic polynucleotide

SEQ ID NO: 9286 - DNA, 55 bp, Artificial Sequence; identical to SEQ ID NO: 7470
  Synthetic polynucleotide

SEQ ID NO: 9287 - DNA, 55 bp, Artificial Sequence; identical to SEQ ID NO: 8055
  Synthetic polynucleotide

SEQ ID NO: 9288 - DNA, 55 bp, Artificial Sequence; identical to SEQ ID NO: 7970
  Synthetic polynucleotide

SEQ ID NO: 9289 - DNA, 55 bp, Artificial Sequence; identical to SEQ ID NO: 7476
  Synthetic polynucleotide

SEQ ID NO: 9290 - DNA, 55 bp, Artificial Sequence; identical to SEQ ID NO: 6805
  Synthetic polynucleotide

SEQ ID NO: 9291 - DNA, 55 bp, Artificial Sequence; identical to SEQ ID NO: 7452
  Synthetic polynucleotide

SEQ ID NO: 9292 - DNA, 55 bp, Artificial Sequence; identical to SEQ ID NO: 6777
  Synthetic polynucleotide

SEQ ID NO: 9293 - DNA, 55 bp, Artificial Sequence; identical to SEQ ID NO: 7646
  Synthetic polynucleotide

SEQ ID NO: 9294 - DNA, 55 bp, Artificial Sequence; identical to SEQ ID NO: 7933
  Synthetic polynucleotide

SEQ ID NO: 9295 - DNA, 55 bp, Artificial Sequence; identical to SEQ ID NO: 7761
  Synthetic polynucleotide

SEQ ID NO: 9296 - DNA, 55 bp, Artificial Sequence; identical to SEQ ID NO: 7196
  Synthetic polynucleotide

SEQ ID NO: 9297 - DNA, 55 bp, Artificial Sequence; identical to SEQ ID NO: 7198
  Synthetic polynucleotide

SEQ ID NO: 9298 - DNA, 55 bp, Artificial Sequence; identical to SEQ ID NO: 6618
  Synthetic polynucleotide

SEQ ID NO: 9299 - DNA, 55 bp, Artificial Sequence; identical to SEQ ID NO: 7663
  Synthetic polynucleotide

SEQ ID NO: 9300 - DNA, 55 bp, Artificial Sequence; identical to SEQ ID NO: 7995
  Synthetic polynucleotide

SEQ ID NO: 9301 - DNA, 55 bp, Artificial Sequence; identical to SEQ ID NO: 6985
  Synthetic polynucleotide

SEQ ID NO: 9302 - DNA, 55 bp, Artificial Sequence; identical to SEQ ID NO: 7595
  Synthetic polynucleotide

SEQ ID NO: 9303 - DNA, 55 bp, Artificial Sequence; identical to SEQ ID NO: 7465
  Synthetic polynucleotide

SEQ ID NO: 9304 - DNA, 55 bp, Artificial Sequence; identical to SEQ ID NO: 7832
  Synthetic polynucleotide

SEQ ID NO: 9305 - DNA, 55 bp, Artificial Sequence; identical to SEQ ID NO: 7278
  Synthetic polynucleotide

SEQ ID NO: 9306 - DNA, 55 bp, Artificial Sequence; identical to SEQ ID NO: 6761
  Synthetic polynucleotide

SEQ ID NO: 9307 - DNA, 55 bp, Artificial Sequence; identical to SEQ ID NO: 6627
  Synthetic polynucleotide

SEQ ID NO: 9308 - DNA, 55 bp, Artificial Sequence; identical to SEQ ID NO: 7696
  Synthetic polynucleotide

SEQ ID NO: 9309 - DNA, 55 bp, Artificial Sequence; identical to SEQ ID NO: 6801
  Synthetic polynucleotide

SEQ ID NO: 9310 - DNA, 55 bp, Artificial Sequence; identical to SEQ ID NO: 7642
  Synthetic polynucleotide

SEQ ID NO: 9311 - DNA, 55 bp, Artificial Sequence; identical to SEQ ID NO: 7767
  Synthetic polynucleotide

SEQ ID NO: 9312 - DNA, 55 bp, Artificial Sequence; identical to SEQ ID NO: 7546
  Synthetic polynucleotide

SEQ ID NO: 9313 - DNA, 55 bp, Artificial Sequence; identical to SEQ ID NO: 6873
  Synthetic polynucleotide

SEQ ID NO: 9314 - DNA, 55 bp, Artificial Sequence; identical to SEQ ID NO: 7851
  Synthetic polynucleotide

SEQ ID NO: 9315 - DNA, 55 bp, Artificial Sequence; identical to SEQ ID NO: 7344
  Synthetic polynucleotide

SEQ ID NO: 9316 - DNA, 55 bp, Artificial Sequence; identical to SEQ ID NO: 7623
  Synthetic polynucleotide

SEQ ID NO: 9317 - DNA, 55 bp, Artificial Sequence; identical to SEQ ID NO: 8008
  Synthetic polynucleotide

SEQ ID NO: 9318 - DNA, 55 bp, Artificial Sequence; identical to SEQ ID NO: 6528
  Synthetic polynucleotide

SEQ ID NO: 9319 - DNA, 55 bp, Artificial Sequence; identical to SEQ ID NO: 7992
  Synthetic polynucleotide

SEQ ID NO: 9320 - DNA, 55 bp, Artificial Sequence; identical to SEQ ID NO: 7431
  Synthetic polynucleotide

SEQ ID NO: 9321 - DNA, 55 bp, Artificial Sequence; identical to SEQ ID NO: 7684
  Synthetic polynucleotide

SEQ ID NO: 9322 - DNA, 55 bp, Artificial Sequence; identical to SEQ ID NO: 6685
  Synthetic polynucleotide

SEQ ID NO: 9323 - DNA, 55 bp, Artificial Sequence; identical to SEQ ID NO: 7521
  Synthetic polynucleotide

SEQ ID NO: 9324 - DNA, 55 bp, Artificial Sequence; identical to SEQ ID NO: 7443
  Synthetic polynucleotide

SEQ ID NO: 9325 - DNA, 55 bp, Artificial Sequence; identical to SEQ ID NO: 7771
  Synthetic polynucleotide

SEQ ID NO: 9326 - DNA, 55 bp, Artificial Sequence; identical to SEQ ID NO: 7756
  Synthetic polynucleotide

SEQ ID NO: 9327 - DNA, 55 bp, Artificial Sequence; identical to SEQ ID NO: 7835
  Synthetic polynucleotide

SEQ ID NO: 9328 - DNA, 55 bp, Artificial Sequence; identical to SEQ ID NO: 6968
  Synthetic polynucleotide

SEQ ID NO: 9329 - DNA, 55 bp, Artificial Sequence; identical to SEQ ID NO: 8077
  Synthetic polynucleotide

SEQ ID NO: 9330 - DNA, 55 bp, Artificial Sequence; identical to SEQ ID NO: 6863
  Synthetic polynucleotide

SEQ ID NO: 9331 - DNA, 55 bp, Artificial Sequence; identical to SEQ ID NO: 7184
  Synthetic polynucleotide

SEQ ID NO: 9332 - DNA, 55 bp, Artificial Sequence; identical to SEQ ID NO: 6629
  Synthetic polynucleotide

SEQ ID NO: 9333 - DNA, 55 bp, Artificial Sequence; identical to SEQ ID NO: 7116
  Synthetic polynucleotide

SEQ ID NO: 9334 - DNA, 55 bp, Artificial Sequence; identical to SEQ ID NO: 7909
  Synthetic polynucleotide

SEQ ID NO: 9335 - DNA, 55 bp, Artificial Sequence; identical to SEQ ID NO: 7513
  Synthetic polynucleotide

SEQ ID NO: 9336 - DNA, 55 bp, Artificial Sequence; identical to SEQ ID NO: 7418
  Synthetic polynucleotide

SEQ ID NO: 9337 - DNA, 55 bp, Artificial Sequence; identical to SEQ ID NO: 7626
  Synthetic polynucleotide

SEQ ID NO: 9338 - DNA, 55 bp, Artificial Sequence; identical to SEQ ID NO: 7217
  Synthetic polynucleotide

SEQ ID NO: 9339 - DNA, 55 bp, Artificial Sequence; identical to SEQ ID NO: 7792
  Synthetic polynucleotide

SEQ ID NO: 9340 - DNA, 55 bp, Artificial Sequence; identical to SEQ ID NO: 7285
  Synthetic polynucleotide

SEQ ID NO: 9341 - DNA, 55 bp, Artificial Sequence; identical to SEQ ID NO: 6647
  Synthetic polynucleotide

SEQ ID NO: 9342 - DNA, 55 bp, Artificial Sequence; identical to SEQ ID NO: 7554
  Synthetic polynucleotide

SEQ ID NO: 9343 - DNA, 55 bp, Artificial Sequence; identical to SEQ ID NO: 6550
  Synthetic polynucleotide

SEQ ID NO: 9344 - DNA, 55 bp, Artificial Sequence; identical to SEQ ID NO: 7511
  Synthetic polynucleotide

SEQ ID NO: 9345 - DNA, 55 bp, Artificial Sequence; identical to SEQ ID NO: 6566
  Synthetic polynucleotide

SEQ ID NO: 9346 - DNA, 55 bp, Artificial Sequence; identical to SEQ ID NO: 7032
  Synthetic polynucleotide

SEQ ID NO: 9347 - DNA, 55 bp, Artificial Sequence; identical to SEQ ID NO: 6759
  Synthetic polynucleotide

SEQ ID NO: 9348 - DNA, 55 bp, Artificial Sequence; identical to SEQ ID NO: 7289
  Synthetic polynucleotide

SEQ ID NO: 9349 - DNA, 55 bp, Artificial Sequence; identical to SEQ ID NO: 6763
  Synthetic polynucleotide

SEQ ID NO: 9350 - DNA, 55 bp, Artificial Sequence; identical to SEQ ID NO: 7535
  Synthetic polynucleotide

SEQ ID NO: 9351 - DNA, 55 bp, Artificial Sequence; identical to SEQ ID NO: 7508
  Synthetic polynucleotide

SEQ ID NO: 9352 - DNA, 55 bp, Artificial Sequence; identical to SEQ ID NO: 6928
  Synthetic polynucleotide

SEQ ID NO: 9353 - DNA, 55 bp, Artificial Sequence; identical to SEQ ID NO: 7090
  Synthetic polynucleotide

SEQ ID NO: 9354 - DNA, 55 bp, Artificial Sequence; identical to SEQ ID NO: 7871
  Synthetic polynucleotide

SEQ ID NO: 9355 - DNA, 55 bp, Artificial Sequence; identical to SEQ ID NO: 7650
  Synthetic polynucleotide

SEQ ID NO: 9356 - DNA, 55 bp, Artificial Sequence; identical to SEQ ID NO: 7627
  Synthetic polynucleotide

SEQ ID NO: 9357 - DNA, 55 bp, Artificial Sequence; identical to SEQ ID NO: 6526
  Synthetic polynucleotide

SEQ ID NO: 9358 - DNA, 55 bp, Artificial Sequence; identical to SEQ ID NO: 7968
  Synthetic polynucleotide

SEQ ID NO: 9359 - DNA, 55 bp, Artificial Sequence; identical to SEQ ID NO: 7091
  Synthetic polynucleotide

SEQ ID NO: 9360 - DNA, 55 bp, Artificial Sequence; identical to SEQ ID NO: 7009
  Synthetic polynucleotide

SEQ ID NO: 9361 - DNA, 55 bp, Artificial Sequence; identical to SEQ ID NO: 7031
  Synthetic polynucleotide

SEQ ID NO: 9362 - DNA, 55 bp, Artificial Sequence; identical to SEQ ID NO: 6605
  Synthetic polynucleotide

SEQ ID NO: 9363 - DNA, 55 bp, Artificial Sequence; identical to SEQ ID NO: 7342
  Synthetic polynucleotide

SEQ ID NO: 9364 - DNA, 55 bp, Artificial Sequence; identical to SEQ ID NO: 7997
  Synthetic polynucleotide

SEQ ID NO: 9365 - DNA, 55 bp, Artificial Sequence; identical to SEQ ID NO: 7902
  Synthetic polynucleotide

SEQ ID NO: 9366 - DNA, 55 bp, Artificial Sequence; identical to SEQ ID NO: 6940
  Synthetic polynucleotide

SEQ ID NO: 9367 - DNA, 55 bp, Artificial Sequence; identical to SEQ ID NO: 7298
  Synthetic polynucleotide

SEQ ID NO: 9368 - DNA, 55 bp, Artificial Sequence; identical to SEQ ID NO: 7845
  Synthetic polynucleotide

SEQ ID NO: 9369 - DNA, 55 bp, Artificial Sequence; identical to SEQ ID NO: 7944
  Synthetic polynucleotide

SEQ ID NO: 9370 - DNA, 55 bp, Artificial Sequence; identical to SEQ ID NO: 8103
  Synthetic polynucleotide

SEQ ID NO: 9371 - DNA, 55 bp, Artificial Sequence; identical to SEQ ID NO: 7868
  Synthetic polynucleotide

SEQ ID NO: 9372 - DNA, 55 bp, Artificial Sequence; identical to SEQ ID NO: 8068
  Synthetic polynucleotide

SEQ ID NO: 9373 - DNA, 55 bp, Artificial Sequence; identical to SEQ ID NO: 7329
  Synthetic polynucleotide

SEQ ID NO: 9374 - DNA, 55 bp, Artificial Sequence; identical to SEQ ID NO: 7860
  Synthetic polynucleotide

SEQ ID NO: 9375 - DNA, 55 bp, Artificial Sequence; identical to SEQ ID NO: 7900
  Synthetic polynucleotide

SEQ ID NO: 9376 - DNA, 55 bp, Artificial Sequence; identical to SEQ ID NO: 7340
  Synthetic polynucleotide

SEQ ID NO: 9377 - DNA, 55 bp, Artificial Sequence; identical to SEQ ID NO: 7870
  Synthetic polynucleotide

SEQ ID NO: 9378 - DNA, 55 bp, Artificial Sequence; identical to SEQ ID NO: 6719
  Synthetic polynucleotide

SEQ ID NO: 9379 - DNA, 55 bp, Artificial Sequence; identical to SEQ ID NO: 6986
  Synthetic polynucleotide

SEQ ID NO: 9380 - DNA, 55 bp, Artificial Sequence; identical to SEQ ID NO: 6652
  Synthetic polynucleotide

SEQ ID NO: 9381 - DNA, 55 bp, Artificial Sequence; identical to SEQ ID NO: 6832
  Synthetic polynucleotide

SEQ ID NO: 9382 - DNA, 55 bp, Artificial Sequence; identical to SEQ ID NO: 7412
  Synthetic polynucleotide

SEQ ID NO: 9383 - DNA, 55 bp, Artificial Sequence; identical to SEQ ID NO: 7714
  Synthetic polynucleotide

SEQ ID NO: 9384 - DNA, 55 bp, Artificial Sequence; identical to SEQ ID NO: 6773
  Synthetic polynucleotide

SEQ ID NO: 9385 - DNA, 55 bp, Artificial Sequence; identical to SEQ ID NO: 7921
  Synthetic polynucleotide

SEQ ID NO: 9386 - DNA, 55 bp, Artificial Sequence; identical to SEQ ID NO: 7347
  Synthetic polynucleotide

SEQ ID NO: 9387 - DNA, 55 bp, Artificial Sequence; identical to SEQ ID NO: 6803
  Synthetic polynucleotide

SEQ ID NO: 9388 - DNA, 55 bp, Artificial Sequence; identical to SEQ ID NO: 6835
  Synthetic polynucleotide

SEQ ID NO: 9389 - DNA, 55 bp, Artificial Sequence; identical to SEQ ID NO: 7962
  Synthetic polynucleotide

SEQ ID NO: 9390 - DNA, 55 bp, Artificial Sequence; identical to SEQ ID NO: 6945
  Synthetic polynucleotide

SEQ ID NO: 9391 - DNA, 55 bp, Artificial Sequence; identical to SEQ ID NO: 7333
  Synthetic polynucleotide

SEQ ID NO: 9392 - DNA, 55 bp, Artificial Sequence; identical to SEQ ID NO: 6684
  Synthetic polynucleotide

SEQ ID NO: 9393 - DNA, 55 bp, Artificial Sequence; identical to SEQ ID NO: 7225
  Synthetic polynucleotide

SEQ ID NO: 9394 - DNA, 55 bp, Artificial Sequence; identical to SEQ ID NO: 7077
  Synthetic polynucleotide

SEQ ID NO: 9395 - DNA, 55 bp, Artificial Sequence; identical to SEQ ID NO: 7991
  Synthetic polynucleotide

SEQ ID NO: 9396 - DNA, 55 bp, Artificial Sequence; identical to SEQ ID NO: 6712
  Synthetic polynucleotide

SEQ ID NO: 9397 - DNA, 55 bp, Artificial Sequence; identical to SEQ ID NO: 7598
  Synthetic polynucleotide

SEQ ID NO: 9398 - DNA, 55 bp, Artificial Sequence; identical to SEQ ID NO: 6548
  Synthetic polynucleotide

SEQ ID NO: 9399 - DNA, 55 bp, Artificial Sequence; identical to SEQ ID NO: 6812
  Synthetic polynucleotide

SEQ ID NO: 9400 - DNA, 55 bp, Artificial Sequence; identical to SEQ ID NO: 7085
  Synthetic polynucleotide

SEQ ID NO: 9401 - DNA, 55 bp, Artificial Sequence; identical to SEQ ID NO: 7818
  Synthetic polynucleotide

SEQ ID NO: 9402 - DNA, 55 bp, Artificial Sequence; identical to SEQ ID NO: 6698
  Synthetic polynucleotide

SEQ ID NO: 9403 - DNA, 55 bp, Artificial Sequence; identical to SEQ ID NO: 7121
  Synthetic polynucleotide

SEQ ID NO: 9404 - DNA, 55 bp, Artificial Sequence; identical to SEQ ID NO: 7410
  Synthetic polynucleotide

SEQ ID NO: 9405 - DNA, 55 bp, Artificial Sequence; identical to SEQ ID NO: 7355
  Synthetic polynucleotide

SEQ ID NO: 9406 - DNA, 55 bp, Artificial Sequence; identical to SEQ ID NO: 7172
  Synthetic polynucleotide

SEQ ID NO: 9407 - DNA, 55 bp, Artificial Sequence; identical to SEQ ID NO: 6956
  Synthetic polynucleotide

SEQ ID NO: 9408 - DNA, 55 bp, Artificial Sequence; identical to SEQ ID NO: 7359
  Synthetic polynucleotide

SEQ ID NO: 9409 - DNA, 55 bp, Artificial Sequence; identical to SEQ ID NO: 8037
  Synthetic polynucleotide

SEQ ID NO: 9410 - DNA, 55 bp, Artificial Sequence; identical to SEQ ID NO: 7474
  Synthetic polynucleotide

SEQ ID NO: 9411 - DNA, 55 bp, Artificial Sequence; identical to SEQ ID NO: 7677
  Synthetic polynucleotide

SEQ ID NO: 9412 - DNA, 55 bp, Artificial Sequence; identical to SEQ ID NO: 7306
  Synthetic polynucleotide

SEQ ID NO: 9413 - DNA, 55 bp, Artificial Sequence; identical to SEQ ID NO: 8096
  Synthetic polynucleotide

SEQ ID NO: 9414 - DNA, 55 bp, Artificial Sequence; identical to SEQ ID NO: 7450
  Synthetic polynucleotide

SEQ ID NO: 9415 - DNA, 55 bp, Artificial Sequence; identical to SEQ ID NO: 7744
  Synthetic polynucleotide

SEQ ID NO: 9416 - DNA, 55 bp, Artificial Sequence; identical to SEQ ID NO: 7250
  Synthetic polynucleotide

SEQ ID NO: 9417 - DNA, 55 bp, Artificial Sequence; identical to SEQ ID NO: 6885
  Synthetic polynucleotide

SEQ ID NO: 9418 - DNA, 55 bp, Artificial Sequence; identical to SEQ ID NO: 7356
  Synthetic polynucleotide

SEQ ID NO: 9419 - DNA, 55 bp, Artificial Sequence; identical to SEQ ID NO: 7430
  Synthetic polynucleotide

SEQ ID NO: 9420 - DNA, 55 bp, Artificial Sequence; identical to SEQ ID NO: 8054
  Synthetic polynucleotide

SEQ ID NO: 9421 - DNA, 55 bp, Artificial Sequence; identical to SEQ ID NO: 7709
  Synthetic polynucleotide

SEQ ID NO: 9422 - DNA, 55 bp, Artificial Sequence; identical to SEQ ID NO: 7133
  Synthetic polynucleotide

SEQ ID NO: 9423 - DNA, 55 bp, Artificial Sequence; identical to SEQ ID NO: 7935
  Synthetic polynucleotide

SEQ ID NO: 9424 - DNA, 55 bp, Artificial Sequence; identical to SEQ ID NO: 7054
  Synthetic polynucleotide

SEQ ID NO: 9425 - DNA, 55 bp, Artificial Sequence; identical to SEQ ID NO: 7640
  Synthetic polynucleotide

SEQ ID NO: 9426 - DNA, 55 bp, Artificial Sequence; identical to SEQ ID NO: 8023
  Synthetic polynucleotide

SEQ ID NO: 9427 - DNA, 55 bp, Artificial Sequence; identical to SEQ ID NO: 6533
  Synthetic polynucleotide

SEQ ID NO: 9428 - DNA, 55 bp, Artificial Sequence; identical to SEQ ID NO: 7673
  Synthetic polynucleotide

SEQ ID NO: 9429 - DNA, 55 bp, Artificial Sequence; identical to SEQ ID NO: 7024
  Synthetic polynucleotide

SEQ ID NO: 9430 - DNA, 55 bp, Artificial Sequence; identical to SEQ ID NO: 7812
  Synthetic polynucleotide

SEQ ID NO: 9431 - DNA, 55 bp, Artificial Sequence; identical to SEQ ID NO: 7334
  Synthetic polynucleotide

SEQ ID NO: 9432 - DNA, 55 bp, Artificial Sequence; identical to SEQ ID NO: 6870
  Synthetic polynucleotide

SEQ ID NO: 9433 - DNA, 55 bp, Artificial Sequence; identical to SEQ ID NO: 7052
  Synthetic polynucleotide

SEQ ID NO: 9434 - DNA, 55 bp, Artificial Sequence; identical to SEQ ID NO: 7081
  Synthetic polynucleotide

SEQ ID NO: 9435 - DNA, 55 bp, Artificial Sequence; identical to SEQ ID NO: 7607
  Synthetic polynucleotide

SEQ ID NO: 9436 - DNA, 55 bp, Artificial Sequence; identical to SEQ ID NO: 6552
  Synthetic polynucleotide

SEQ ID NO: 9437 - DNA, 55 bp, Artificial Sequence; identical to SEQ ID NO: 7892
  Synthetic polynucleotide

SEQ ID NO: 9438 - DNA, 55 bp, Artificial Sequence; identical to SEQ ID NO: 7440
  Synthetic polynucleotide

SEQ ID NO: 9439 - DNA, 55 bp, Artificial Sequence; identical to SEQ ID NO: 7011
  Synthetic polynucleotide

SEQ ID NO: 9440 - DNA, 55 bp, Artificial Sequence; identical to SEQ ID NO: 6992
  Synthetic polynucleotide

SEQ ID NO: 9441 - DNA, 55 bp, Artificial Sequence; identical to SEQ ID NO: 7908
  Synthetic polynucleotide

SEQ ID NO: 9442 - DNA, 55 bp, Artificial Sequence; identical to SEQ ID NO: 7069
  Synthetic polynucleotide

SEQ ID NO: 9443 - DNA, 55 bp, Artificial Sequence; identical to SEQ ID NO: 7725
  Synthetic polynucleotide

SEQ ID NO: 9444 - DNA, 55 bp, Artificial Sequence; identical to SEQ ID NO: 7549
  Synthetic polynucleotide

SEQ ID NO: 9445 - DNA, 55 bp, Artificial Sequence; identical to SEQ ID NO: 7265
  Synthetic polynucleotide

SEQ ID NO: 9446 - DNA, 55 bp, Artificial Sequence; identical to SEQ ID NO: 6867
  Synthetic polynucleotide

SEQ ID NO: 9447 - DNA, 55 bp, Artificial Sequence; identical to SEQ ID NO: 7703
  Synthetic polynucleotide

SEQ ID NO: 9448 - DNA, 55 bp, Artificial Sequence; identical to SEQ ID NO: 6966
  Synthetic polynucleotide

SEQ ID NO: 9449 - DNA, 55 bp, Artificial Sequence; identical to SEQ ID NO: 7990
  Synthetic polynucleotide

SEQ ID NO: 9450 - DNA, 55 bp, Artificial Sequence; identical to SEQ ID NO: 7890
  Synthetic polynucleotide

SEQ ID NO: 9451 - DNA, 55 bp, Artificial Sequence; identical to SEQ ID NO: 7123
  Synthetic polynucleotide

SEQ ID NO: 9452 - DNA, 55 bp, Artificial Sequence; identical to SEQ ID NO: 7050
  Synthetic polynucleotide

SEQ ID NO: 9453 - DNA, 55 bp, Artificial Sequence; identical to SEQ ID NO: 7325
  Synthetic polynucleotide

SEQ ID NO: 9454 - DNA, 55 bp, Artificial Sequence; identical to SEQ ID NO: 7979
  Synthetic polynucleotide

SEQ ID NO: 9455 - DNA, 55 bp, Artificial Sequence; identical to SEQ ID NO: 7659
  Synthetic polynucleotide

SEQ ID NO: 9456 - DNA, 55 bp, Artificial Sequence; identical to SEQ ID NO: 8009
  Synthetic polynucleotide

SEQ ID NO: 9457 - DNA, 55 bp, Artificial Sequence; identical to SEQ ID NO: 6846
  Synthetic polynucleotide

SEQ ID NO: 9458 - DNA, 55 bp, Artificial Sequence; identical to SEQ ID NO: 6585
  Synthetic polynucleotide

SEQ ID NO: 9459 - DNA, 55 bp, Artificial Sequence; identical to SEQ ID NO: 7045
  Synthetic polynucleotide

SEQ ID NO: 9460 - DNA, 55 bp, Artificial Sequence; identical to SEQ ID NO: 7018
  Synthetic polynucleotide

SEQ ID NO: 9461 - DNA, 55 bp, Artificial Sequence; identical to SEQ ID NO: 7472
  Synthetic polynucleotide

SEQ ID NO: 9462 - DNA, 55 bp, Artificial Sequence; identical to SEQ ID NO: 7836
  Synthetic polynucleotide

SEQ ID NO: 9463 - DNA, 55 bp, Artificial Sequence; identical to SEQ ID NO: 6574
  Synthetic polynucleotide

SEQ ID NO: 9464 - DNA, 55 bp, Artificial Sequence; identical to SEQ ID NO: 7565
  Synthetic polynucleotide

SEQ ID NO: 9465 - DNA, 55 bp, Artificial Sequence; identical to SEQ ID NO: 7177
  Synthetic polynucleotide

SEQ ID NO: 9466 - DNA, 55 bp, Artificial Sequence; identical to SEQ ID NO: 7234
  Synthetic polynucleotide

SEQ ID NO: 9467 - DNA, 55 bp, Artificial Sequence; identical to SEQ ID NO: 6623
  Synthetic polynucleotide

SEQ ID NO: 9468 - DNA, 55 bp, Artificial Sequence; identical to SEQ ID NO: 7179
  Synthetic polynucleotide

SEQ ID NO: 9469 - DNA, 55 bp, Artificial Sequence; identical to SEQ ID NO: 6841
  Synthetic polynucleotide

SEQ ID NO: 9470 - DNA, 55 bp, Artificial Sequence; identical to SEQ ID NO: 7772
  Synthetic polynucleotide

SEQ ID NO: 9471 - DNA, 55 bp, Artificial Sequence; identical to SEQ ID NO: 7561
  Synthetic polynucleotide

SEQ ID NO: 9472 - DNA, 55 bp, Artificial Sequence; identical to SEQ ID NO: 7004
  Synthetic polynucleotide

SEQ ID NO: 9473 - DNA, 55 bp, Artificial Sequence; identical to SEQ ID NO: 7676
  Synthetic polynucleotide

SEQ ID NO: 9474 - DNA, 55 bp, Artificial Sequence; identical to SEQ ID NO: 6638
  Synthetic polynucleotide

SEQ ID NO: 9475 - DNA, 55 bp, Artificial Sequence; identical to SEQ ID NO: 6588
  Synthetic polynucleotide

SEQ ID NO: 9476 - DNA, 55 bp, Artificial Sequence; identical to SEQ ID NO: 6965
  Synthetic polynucleotide

SEQ ID NO: 9477 - DNA, 55 bp, Artificial Sequence; identical to SEQ ID NO: 6598
  Synthetic polynucleotide

SEQ ID NO: 9478 - DNA, 55 bp, Artificial Sequence; identical to SEQ ID NO: 7769
  Synthetic polynucleotide

SEQ ID NO: 9479 - DNA, 55 bp, Artificial Sequence; identical to SEQ ID NO: 7547
  Synthetic polynucleotide

SEQ ID NO: 9480 - DNA, 55 bp, Artificial Sequence; identical to SEQ ID NO: 6617
  Synthetic polynucleotide

SEQ ID NO: 9481 - DNA, 55 bp, Artificial Sequence; identical to SEQ ID NO: 6970
  Synthetic polynucleotide

SEQ ID NO: 9482 - DNA, 55 bp, Artificial Sequence; identical to SEQ ID NO: 8040
  Synthetic polynucleotide

SEQ ID NO: 9483 - DNA, 55 bp, Artificial Sequence; identical to SEQ ID NO: 8104
  Synthetic polynucleotide

SEQ ID NO: 9484 - DNA, 55 bp, Artificial Sequence; identical to SEQ ID NO: 8005
  Synthetic polynucleotide

SEQ ID NO: 9485 - DNA, 55 bp, Artificial Sequence; identical to SEQ ID NO: 7876
  Synthetic polynucleotide

SEQ ID NO: 9486 - DNA, 55 bp, Artificial Sequence; identical to SEQ ID NO: 7291
  Synthetic polynucleotide

SEQ ID NO: 9487 - DNA, 55 bp, Artificial Sequence; identical to SEQ ID NO: 7076
  Synthetic polynucleotide

SEQ ID NO: 9488 - DNA, 55 bp, Artificial Sequence; identical to SEQ ID NO: 6960
  Synthetic polynucleotide

SEQ ID NO: 9489 - DNA, 55 bp, Artificial Sequence; identical to SEQ ID NO: 7394
  Synthetic polynucleotide

SEQ ID NO: 9490 - DNA, 55 bp, Artificial Sequence; identical to SEQ ID NO: 7786
  Synthetic polynucleotide

SEQ ID NO: 9491 - DNA, 55 bp, Artificial Sequence; identical to SEQ ID NO: 7375
  Synthetic polynucleotide

SEQ ID NO: 9492 - DNA, 55 bp, Artificial Sequence; identical to SEQ ID NO: 6706
  Synthetic polynucleotide

SEQ ID NO: 9493 - DNA, 55 bp, Artificial Sequence; identical to SEQ ID NO: 7831
  Synthetic polynucleotide

SEQ ID NO: 9494 - DNA, 55 bp, Artificial Sequence; identical to SEQ ID NO: 8076
  Synthetic polynucleotide

SEQ ID NO: 9495 - DNA, 55 bp, Artificial Sequence; identical to SEQ ID NO: 7194
  Synthetic polynucleotide

SEQ ID NO: 9496 - DNA, 55 bp, Artificial Sequence; identical to SEQ ID NO: 6888
  Synthetic polynucleotide

SEQ ID NO: 9497 - DNA, 55 bp, Artificial Sequence; identical to SEQ ID NO: 7318
  Synthetic polynucleotide

SEQ ID NO: 9498 - DNA, 55 bp, Artificial Sequence; identical to SEQ ID NO: 7884
  Synthetic polynucleotide

SEQ ID NO: 9499 - DNA, 55 bp, Artificial Sequence; identical to SEQ ID NO: 7372
  Synthetic polynucleotide

SEQ ID NO: 9500 - DNA, 55 bp, Artificial Sequence; identical to SEQ ID NO: 6727
  Synthetic polynucleotide

SEQ ID NO: 9501 - DNA, 55 bp, Artificial Sequence; identical to SEQ ID NO: 7666
  Synthetic polynucleotide

SEQ ID NO: 9502 - DNA, 55 bp, Artificial Sequence; identical to SEQ ID NO: 6840
  Synthetic polynucleotide

SEQ ID NO: 9503 - DNA, 55 bp, Artificial Sequence; identical to SEQ ID NO: 6821
  Synthetic polynucleotide

SEQ ID NO: 9504 - DNA, 55 bp, Artificial Sequence; identical to SEQ ID NO: 7584
  Synthetic polynucleotide

SEQ ID NO: 9505 - DNA, 55 bp, Artificial Sequence; identical to SEQ ID NO: 7059
  Synthetic polynucleotide

SEQ ID NO: 9506 - DNA, 55 bp, Artificial Sequence; identical to SEQ ID NO: 8003
  Synthetic polynucleotide

SEQ ID NO: 9507 - DNA, 55 bp, Artificial Sequence; identical to SEQ ID NO: 7520
  Synthetic polynucleotide

SEQ ID NO: 9508 - DNA, 55 bp, Artificial Sequence; identical to SEQ ID NO: 7539
  Synthetic polynucleotide

SEQ ID NO: 9509 - DNA, 55 bp, Artificial Sequence; identical to SEQ ID NO: 7922
  Synthetic polynucleotide

SEQ ID NO: 9510 - DNA, 55 bp, Artificial Sequence; identical to SEQ ID NO: 7591
  Synthetic polynucleotide

SEQ ID NO: 9511 - DNA, 55 bp, Artificial Sequence; identical to SEQ ID NO: 7689
  Synthetic polynucleotide

SEQ ID NO: 9512 - DNA, 55 bp, Artificial Sequence; identical to SEQ ID NO: 7872
  Synthetic polynucleotide

SEQ ID NO: 9513 - DNA, 55 bp, Artificial Sequence; identical to SEQ ID NO: 7741
  Synthetic polynucleotide

SEQ ID NO: 9514 - DNA, 55 bp, Artificial Sequence; identical to SEQ ID NO: 7233
  Synthetic polynucleotide

SEQ ID NO: 9515 - DNA, 55 bp, Artificial Sequence; identical to SEQ ID NO: 7635
  Synthetic polynucleotide

SEQ ID NO: 9516 - DNA, 55 bp, Artificial Sequence; identical to SEQ ID NO: 7578
  Synthetic polynucleotide

SEQ ID NO: 9517 - DNA, 55 bp, Artificial Sequence; identical to SEQ ID NO: 7638
  Synthetic polynucleotide

SEQ ID NO: 9518 - DNA, 55 bp, Artificial Sequence; identical to SEQ ID NO: 7791
  Synthetic polynucleotide

SEQ ID NO: 9519 - DNA, 55 bp, Artificial Sequence; identical to SEQ ID NO: 6857
  Synthetic polynucleotide

SEQ ID NO: 9520 - DNA, 55 bp, Artificial Sequence; identical to SEQ ID NO: 7517
  Synthetic polynucleotide

SEQ ID NO: 9521 - DNA, 55 bp, Artificial Sequence; identical to SEQ ID NO: 6558
  Synthetic polynucleotide

SEQ ID NO: 9522 - DNA, 55 bp, Artificial Sequence; identical to SEQ ID NO: 7505
  Synthetic polynucleotide

SEQ ID NO: 9523 - DNA, 55 bp, Artificial Sequence; identical to SEQ ID NO: 6576
  Synthetic polynucleotide

SEQ ID NO: 9524 - DNA, 55 bp, Artificial Sequence; identical to SEQ ID NO: 7185
  Synthetic polynucleotide

SEQ ID NO: 9525 - DNA, 55 bp, Artificial Sequence; identical to SEQ ID NO: 7903
  Synthetic polynucleotide

SEQ ID NO: 9526 - DNA, 55 bp, Artificial Sequence; identical to SEQ ID NO: 6756
  Synthetic polynucleotide

SEQ ID NO: 9527 - DNA, 55 bp, Artificial Sequence; identical to SEQ ID NO: 7500
  Synthetic polynucleotide

SEQ ID NO: 9528 - DNA, 55 bp, Artificial Sequence; identical to SEQ ID NO: 7720
  Synthetic polynucleotide

SEQ ID NO: 9529 - DNA, 55 bp, Artificial Sequence; identical to SEQ ID NO: 7199
  Synthetic polynucleotide

SEQ ID NO: 9530 - DNA, 55 bp, Artificial Sequence; identical to SEQ ID NO: 7402
  Synthetic polynucleotide

SEQ ID NO: 9531 - DNA, 55 bp, Artificial Sequence; identical to SEQ ID NO: 6810
  Synthetic polynucleotide

SEQ ID NO: 9532 - DNA, 55 bp, Artificial Sequence; identical to SEQ ID NO: 7042
  Synthetic polynucleotide

SEQ ID NO: 9533 - DNA, 55 bp, Artificial Sequence; identical to SEQ ID NO: 7270
  Synthetic polynucleotide

SEQ ID NO: 9534 - DNA, 55 bp, Artificial Sequence; identical to SEQ ID NO: 7733
  Synthetic polynucleotide

SEQ ID NO: 9535 - DNA, 55 bp, Artificial Sequence; identical to SEQ ID NO: 6586
  Synthetic polynucleotide

SEQ ID NO: 9536 - DNA, 55 bp, Artificial Sequence; identical to SEQ ID NO: 6974
  Synthetic polynucleotide

SEQ ID NO: 9537 - DNA, 55 bp, Artificial Sequence; identical to SEQ ID NO: 7966
  Synthetic polynucleotide

SEQ ID NO: 9538 - DNA, 55 bp, Artificial Sequence; identical to SEQ ID NO: 6952
  Synthetic polynucleotide

SEQ ID NO: 9539 - DNA, 55 bp, Artificial Sequence; identical to SEQ ID NO: 7574
  Synthetic polynucleotide

SEQ ID NO: 9540 - DNA, 55 bp, Artificial Sequence; identical to SEQ ID NO: 6571
  Synthetic polynucleotide

SEQ ID NO: 9541 - DNA, 55 bp, Artificial Sequence; identical to SEQ ID NO: 7269
  Synthetic polynucleotide

SEQ ID NO: 9542 - DNA, 55 bp, Artificial Sequence; identical to SEQ ID NO: 8064
  Synthetic polynucleotide

SEQ ID NO: 9543 - DNA, 55 bp, Artificial Sequence; identical to SEQ ID NO: 6884
  Synthetic polynucleotide

SEQ ID NO: 9544 - DNA, 55 bp, Artificial Sequence; identical to SEQ ID NO: 6543
  Synthetic polynucleotide

SEQ ID NO: 9545 - DNA, 55 bp, Artificial Sequence; identical to SEQ ID NO: 7881
  Synthetic polynucleotide

SEQ ID NO: 9546 - DNA, 55 bp, Artificial Sequence; identical to SEQ ID NO: 7378
  Synthetic polynucleotide

SEQ ID NO: 9547 - DNA, 55 bp, Artificial Sequence; identical to SEQ ID NO: 7914
  Synthetic polynucleotide

SEQ ID NO: 9548 - DNA, 55 bp, Artificial Sequence; identical to SEQ ID NO: 7987
  Synthetic polynucleotide

SEQ ID NO: 9549 - DNA, 55 bp, Artificial Sequence; identical to SEQ ID NO: 8016
  Synthetic polynucleotide

SEQ ID NO: 9550 - DNA, 55 bp, Artificial Sequence; identical to SEQ ID NO: 7000
  Synthetic polynucleotide

SEQ ID NO: 9551 - DNA, 55 bp, Artificial Sequence; identical to SEQ ID NO: 7639
  Synthetic polynucleotide

SEQ ID NO: 9552 - DNA, 55 bp, Artificial Sequence; identical to SEQ ID NO: 6850
  Synthetic polynucleotide

SEQ ID NO: 9553 - DNA, 55 bp, Artificial Sequence; identical to SEQ ID NO: 7529
  Synthetic polynucleotide

SEQ ID NO: 9554 - DNA, 55 bp, Artificial Sequence; identical to SEQ ID NO: 7904
  Synthetic polynucleotide

SEQ ID NO: 9555 - DNA, 55 bp, Artificial Sequence; identical to SEQ ID NO: 6635
  Synthetic polynucleotide

SEQ ID NO: 9556 - DNA, 55 bp, Artificial Sequence; identical to SEQ ID NO: 6527
  Synthetic polynucleotide

SEQ ID NO: 9557 - DNA, 55 bp, Artificial Sequence; identical to SEQ ID NO: 8062
  Synthetic polynucleotide

SEQ ID NO: 9558 - DNA, 55 bp, Artificial Sequence; identical to SEQ ID NO: 6811
  Synthetic polynucleotide

SEQ ID NO: 9559 - DNA, 55 bp, Artificial Sequence; identical to SEQ ID NO: 7854
  Synthetic polynucleotide

SEQ ID NO: 9560 - DNA, 55 bp, Artificial Sequence; identical to SEQ ID NO: 6929
  Synthetic polynucleotide

SEQ ID NO: 9561 - DNA, 55 bp, Artificial Sequence; identical to SEQ ID NO: 7843
  Synthetic polynucleotide

SEQ ID NO: 9562 - DNA, 55 bp, Artificial Sequence; identical to SEQ ID NO: 6725
  Synthetic polynucleotide

SEQ ID NO: 9563 - DNA, 55 bp, Artificial Sequence; identical to SEQ ID NO: 6731
  Synthetic polynucleotide

SEQ ID NO: 9564 - DNA, 55 bp, Artificial Sequence; identical to SEQ ID NO: 6695
  Synthetic polynucleotide

SEQ ID NO: 9565 - DNA, 55 bp, Artificial Sequence; identical to SEQ ID NO: 6729
  Synthetic polynucleotide

SEQ ID NO: 9566 - DNA, 55 bp, Artificial Sequence; identical to SEQ ID NO: 7886
  Synthetic polynucleotide

SEQ ID NO: 9567 - DNA, 55 bp, Artificial Sequence; identical to SEQ ID NO: 7108
  Synthetic polynucleotide

SEQ ID NO: 9568 - DNA, 55 bp, Artificial Sequence; identical to SEQ ID NO: 7248
  Synthetic polynucleotide

SEQ ID NO: 9569 - DNA, 55 bp, Artificial Sequence; identical to SEQ ID NO: 6815
  Synthetic polynucleotide

SEQ ID NO: 9570 - DNA, 55 bp, Artificial Sequence; identical to SEQ ID NO: 6997
  Synthetic polynucleotide

SEQ ID NO: 9571 - DNA, 55 bp, Artificial Sequence; identical to SEQ ID NO: 7019
  Synthetic polynucleotide

SEQ ID NO: 9572 - DNA, 55 bp, Artificial Sequence; identical to SEQ ID NO: 7468
  Synthetic polynucleotide

SEQ ID NO: 9573 - DNA, 55 bp, Artificial Sequence; identical to SEQ ID NO: 6664
  Synthetic polynucleotide

SEQ ID NO: 9574 - DNA, 55 bp, Artificial Sequence; identical to SEQ ID NO: 7295
  Synthetic polynucleotide

SEQ ID NO: 9575 - DNA, 55 bp, Artificial Sequence; identical to SEQ ID NO: 6942
  Synthetic polynucleotide

SEQ ID NO: 9576 - DNA, 55 bp, Artificial Sequence; identical to SEQ ID NO: 7195
  Synthetic polynucleotide

SEQ ID NO: 9577 - DNA, 55 bp, Artificial Sequence; identical to SEQ ID NO: 7182
  Synthetic polynucleotide

SEQ ID NO: 9578 - DNA, 55 bp, Artificial Sequence; identical to SEQ ID NO: 7305
  Synthetic polynucleotide

SEQ ID NO: 9579 - DNA, 55 bp, Artificial Sequence; identical to SEQ ID NO: 6724
  Synthetic polynucleotide

SEQ ID NO: 9580 - DNA, 55 bp, Artificial Sequence; identical to SEQ ID NO: 7949
  Synthetic polynucleotide

SEQ ID NO: 9581 - DNA, 55 bp, Artificial Sequence; identical to SEQ ID NO: 6954
  Synthetic polynucleotide

SEQ ID NO: 9582 - DNA, 55 bp, Artificial Sequence; identical to SEQ ID NO: 6739
  Synthetic polynucleotide

SEQ ID NO: 9583 - DNA, 55 bp, Artificial Sequence; identical to SEQ ID NO: 6798
  Synthetic polynucleotide

SEQ ID NO: 9584 - DNA, 55 bp, Artificial Sequence; identical to SEQ ID NO: 7671
  Synthetic polynucleotide

SEQ ID NO: 9585 - DNA, 55 bp, Artificial Sequence; identical to SEQ ID NO: 6722
  Synthetic polynucleotide

SEQ ID NO: 9586 - DNA, 55 bp, Artificial Sequence; identical to SEQ ID NO: 7526
  Synthetic polynucleotide

SEQ ID NO: 9587 - DNA, 55 bp, Artificial Sequence; identical to SEQ ID NO: 6887
  Synthetic polynucleotide

SEQ ID NO: 9588 - DNA, 55 bp, Artificial Sequence; identical to SEQ ID NO: 7030
  Synthetic polynucleotide

SEQ ID NO: 9589 - DNA, 55 bp, Artificial Sequence; identical to SEQ ID NO: 7572
  Synthetic polynucleotide

SEQ ID NO: 9590 - DNA, 55 bp, Artificial Sequence; identical to SEQ ID NO: 7830
  Synthetic polynucleotide

SEQ ID NO: 9591 - DNA, 55 bp, Artificial Sequence; identical to SEQ ID NO: 7899
  Synthetic polynucleotide

SEQ ID NO: 9592 - DNA, 55 bp, Artificial Sequence; identical to SEQ ID NO: 7208
  Synthetic polynucleotide

SEQ ID NO: 9593 - DNA, 55 bp, Artificial Sequence; identical to SEQ ID NO: 7254
  Synthetic polynucleotide

SEQ ID NO: 9594 - DNA, 55 bp, Artificial Sequence; identical to SEQ ID NO: 7159
  Synthetic polynucleotide

SEQ ID NO: 9595 - DNA, 55 bp, Artificial Sequence; identical to SEQ ID NO: 7399
  Synthetic polynucleotide

SEQ ID NO: 9596 - DNA, 55 bp, Artificial Sequence; identical to SEQ ID NO: 6937
  Synthetic polynucleotide

SEQ ID NO: 9597 - DNA, 55 bp, Artificial Sequence; identical to SEQ ID NO: 7192
  Synthetic polynucleotide

SEQ ID NO: 9598 - DNA, 55 bp, Artificial Sequence; identical to SEQ ID NO: 7330
  Synthetic polynucleotide

SEQ ID NO: 9599 - DNA, 55 bp, Artificial Sequence; identical to SEQ ID NO: 7205
  Synthetic polynucleotide

SEQ ID NO: 9600 - DNA, 55 bp, Artificial Sequence; identical to SEQ ID NO: 7148
  Synthetic polynucleotide

SEQ ID NO: 9601 - DNA, 55 bp, Artificial Sequence; identical to SEQ ID NO: 6772
  Synthetic polynucleotide

SEQ ID NO: 9602 - DNA, 55 bp, Artificial Sequence; identical to SEQ ID NO: 6608
  Synthetic polynucleotide

SEQ ID NO: 9603 - DNA, 55 bp, Artificial Sequence; identical to SEQ ID NO: 7894
  Synthetic polynucleotide

SEQ ID NO: 9604 - DNA, 55 bp, Artificial Sequence; identical to SEQ ID NO: 8025
  Synthetic polynucleotide

SEQ ID NO: 9605 - DNA, 55 bp, Artificial Sequence; identical to SEQ ID NO: 6741
  Synthetic polynucleotide

SEQ ID NO: 9606 - DNA, 55 bp, Artificial Sequence; identical to SEQ ID NO: 7095
  Synthetic polynucleotide

SEQ ID NO: 9607 - DNA, 55 bp, Artificial Sequence; identical to SEQ ID NO: 6983
  Synthetic polynucleotide

SEQ ID NO: 9608 - DNA, 55 bp, Artificial Sequence; identical to SEQ ID NO: 7976
  Synthetic polynucleotide

SEQ ID NO: 9609 - DNA, 55 bp, Artificial Sequence; identical to SEQ ID NO: 7388
  Synthetic polynucleotide

SEQ ID NO: 9610 - DNA, 55 bp, Artificial Sequence; identical to SEQ ID NO: 7514
  Synthetic polynucleotide

SEQ ID NO: 9611 - DNA, 55 bp, Artificial Sequence; identical to SEQ ID NO: 6771
  Synthetic polynucleotide

SEQ ID NO: 9612 - DNA, 55 bp, Artificial Sequence; identical to SEQ ID NO: 8002
  Synthetic polynucleotide

SEQ ID NO: 9613 - DNA, 55 bp, Artificial Sequence; identical to SEQ ID NO: 6584
  Synthetic polynucleotide

SEQ ID NO: 9614 - DNA, 55 bp, Artificial Sequence; identical to SEQ ID NO: 7813
  Synthetic polynucleotide

SEQ ID NO: 9615 - DNA, 55 bp, Artificial Sequence; identical to SEQ ID NO: 7353
  Synthetic polynucleotide

SEQ ID NO: 9616 - DNA, 55 bp, Artificial Sequence; identical to SEQ ID NO: 7354
  Synthetic polynucleotide

SEQ ID NO: 9617 - DNA, 55 bp, Artificial Sequence; identical to SEQ ID NO: 6901
  Synthetic polynucleotide

SEQ ID NO: 9618 - DNA, 55 bp, Artificial Sequence; identical to SEQ ID NO: 7178
  Synthetic polynucleotide

SEQ ID NO: 9619 - DNA, 55 bp, Artificial Sequence; identical to SEQ ID NO: 7867
  Synthetic polynucleotide

SEQ ID NO: 9620 - DNA, 55 bp, Artificial Sequence; identical to SEQ ID NO: 7585
  Synthetic polynucleotide

SEQ ID NO: 9621 - DNA, 55 bp, Artificial Sequence; identical to SEQ ID NO: 6950
  Synthetic polynucleotide

SEQ ID NO: 9622 - DNA, 55 bp, Artificial Sequence; identical to SEQ ID NO: 7519
  Synthetic polynucleotide

SEQ ID NO: 9623 - DNA, 55 bp, Artificial Sequence; identical to SEQ ID NO: 7611
  Synthetic polynucleotide

SEQ ID NO: 9624 - DNA, 55 bp, Artificial Sequence; identical to SEQ ID NO: 7361
  Synthetic polynucleotide

SEQ ID NO: 9625 - DNA, 55 bp, Artificial Sequence; identical to SEQ ID NO: 6653
  Synthetic polynucleotide

SEQ ID NO: 9626 - DNA, 55 bp, Artificial Sequence; identical to SEQ ID NO: 7201
  Synthetic polynucleotide

SEQ ID NO: 9627 - DNA, 55 bp, Artificial Sequence; identical to SEQ ID NO: 7797
  Synthetic polynucleotide

SEQ ID NO: 9628 - DNA, 55 bp, Artificial Sequence; identical to SEQ ID NO: 8014
  Synthetic polynucleotide

SEQ ID NO: 9629 - DNA, 55 bp, Artificial Sequence; identical to SEQ ID NO: 6926
  Synthetic polynucleotide

SEQ ID NO: 9630 - DNA, 55 bp, Artificial Sequence; identical to SEQ ID NO: 7389
  Synthetic polynucleotide

SEQ ID NO: 9631 - DNA, 55 bp, Artificial Sequence; identical to SEQ ID NO: 6839
  Synthetic polynucleotide

SEQ ID NO: 9632 - DNA, 55 bp, Artificial Sequence; identical to SEQ ID NO: 6862
  Synthetic polynucleotide

SEQ ID NO: 9633 - DNA, 55 bp, Artificial Sequence; identical to SEQ ID NO: 6637
  Synthetic polynucleotide

SEQ ID NO: 9634 - DNA, 55 bp, Artificial Sequence; identical to SEQ ID NO: 7327
  Synthetic polynucleotide

SEQ ID NO: 9635 - DNA, 55 bp, Artificial Sequence; identical to SEQ ID NO: 7146
  Synthetic polynucleotide

SEQ ID NO: 9636 - DNA, 55 bp, Artificial Sequence; identical to SEQ ID NO: 6934
  Synthetic polynucleotide

SEQ ID NO: 9637 - DNA, 55 bp, Artificial Sequence; identical to SEQ ID NO: 6705
  Synthetic polynucleotide

SEQ ID NO: 9638 - DNA, 55 bp, Artificial Sequence; identical to SEQ ID NO: 6687
  Synthetic polynucleotide

SEQ ID NO: 9639 - DNA, 55 bp, Artificial Sequence; identical to SEQ ID NO: 6568
  Synthetic polynucleotide

SEQ ID NO: 9640 - DNA, 55 bp, Artificial Sequence; identical to SEQ ID NO: 7190
  Synthetic polynucleotide

SEQ ID NO: 9641 - DNA, 55 bp, Artificial Sequence; identical to SEQ ID NO: 6590
  Synthetic polynucleotide

SEQ ID NO: 9642 - DNA, 55 bp, Artificial Sequence; identical to SEQ ID NO: 7154
  Synthetic polynucleotide

SEQ ID NO: 9643 - DNA, 55 bp, Artificial Sequence; identical to SEQ ID NO: 7350
  Synthetic polynucleotide

SEQ ID NO: 9644 - DNA, 55 bp, Artificial Sequence; identical to SEQ ID NO: 7660
  Synthetic polynucleotide

SEQ ID NO: 9645 - DNA, 55 bp, Artificial Sequence; identical to SEQ ID NO: 6747
  Synthetic polynucleotide

SEQ ID NO: 9646 - DNA, 55 bp, Artificial Sequence; identical to SEQ ID NO: 7954
  Synthetic polynucleotide

SEQ ID NO: 9647 - DNA, 55 bp, Artificial Sequence; identical to SEQ ID NO: 8038
  Synthetic polynucleotide

SEQ ID NO: 9648 - DNA, 55 bp, Artificial Sequence; identical to SEQ ID NO: 7655
  Synthetic polynucleotide

SEQ ID NO: 9649 - DNA, 55 bp, Artificial Sequence; identical to SEQ ID NO: 7690
  Synthetic polynucleotide

SEQ ID NO: 9650 - DNA, 55 bp, Artificial Sequence; identical to SEQ ID NO: 6749
  Synthetic polynucleotide

SEQ ID NO: 9651 - DNA, 55 bp, Artificial Sequence; identical to SEQ ID NO: 7755
  Synthetic polynucleotide

SEQ ID NO: 9652 - DNA, 55 bp, Artificial Sequence; identical to SEQ ID NO: 8001
  Synthetic polynucleotide

SEQ ID NO: 9653 - DNA, 55 bp, Artificial Sequence; identical to SEQ ID NO: 6909
  Synthetic polynucleotide

SEQ ID NO: 9654 - DNA, 55 bp, Artificial Sequence; identical to SEQ ID NO: 8108
  Synthetic polynucleotide

SEQ ID NO: 9655 - DNA, 55 bp, Artificial Sequence; identical to SEQ ID NO: 6809
  Synthetic polynucleotide

SEQ ID NO: 9656 - DNA, 55 bp, Artificial Sequence; identical to SEQ ID NO: 7579
  Synthetic polynucleotide

SEQ ID NO: 9657 - DNA, 55 bp, Artificial Sequence; identical to SEQ ID NO: 7496
  Synthetic polynucleotide

SEQ ID NO: 9658 - DNA, 55 bp, Artificial Sequence; identical to SEQ ID NO: 7773
  Synthetic polynucleotide

SEQ ID NO: 9659 - DNA, 55 bp, Artificial Sequence; identical to SEQ ID NO: 7588
  Synthetic polynucleotide

SEQ ID NO: 9660 - DNA, 55 bp, Artificial Sequence; identical to SEQ ID NO: 7035
  Synthetic polynucleotide

SEQ ID NO: 9661 - DNA, 55 bp, Artificial Sequence; identical to SEQ ID NO: 7129
  Synthetic polynucleotide

SEQ ID NO: 9662 - DNA, 55 bp, Artificial Sequence; identical to SEQ ID NO: 6889
  Synthetic polynucleotide

SEQ ID NO: 9663 - DNA, 55 bp, Artificial Sequence; identical to SEQ ID NO: 7300
  Synthetic polynucleotide

SEQ ID NO: 9664 - DNA, 55 bp, Artificial Sequence; identical to SEQ ID NO: 7542
  Synthetic polynucleotide

SEQ ID NO: 9665 - DNA, 55 bp, Artificial Sequence; identical to SEQ ID NO: 6553
  Synthetic polynucleotide

SEQ ID NO: 9666 - DNA, 55 bp, Artificial Sequence; identical to SEQ ID NO: 7363
  Synthetic polynucleotide

SEQ ID NO: 9667 - DNA, 55 bp, Artificial Sequence; identical to SEQ ID NO: 6816
  Synthetic polynucleotide

SEQ ID NO: 9668 - DNA, 55 bp, Artificial Sequence; identical to SEQ ID NO: 7098
  Synthetic polynucleotide

SEQ ID NO: 9669 - DNA, 55 bp, Artificial Sequence; identical to SEQ ID NO: 6665
  Synthetic polynucleotide

SEQ ID NO: 9670 - DNA, 55 bp, Artificial Sequence; identical to SEQ ID NO: 7601
  Synthetic polynucleotide

SEQ ID NO: 9671 - DNA, 55 bp, Artificial Sequence; identical to SEQ ID NO: 7219
  Synthetic polynucleotide

SEQ ID NO: 9672 - DNA, 55 bp, Artificial Sequence; identical to SEQ ID NO: 6996
  Synthetic polynucleotide

SEQ ID NO: 9673 - DNA, 55 bp, Artificial Sequence; identical to SEQ ID NO: 6752
  Synthetic polynucleotide

SEQ ID NO: 9674 - DNA, 55 bp, Artificial Sequence; identical to SEQ ID NO: 7620
  Synthetic polynucleotide

SEQ ID NO: 9675 - DNA, 55 bp, Artificial Sequence; identical to SEQ ID NO: 7122
  Synthetic polynucleotide

SEQ ID NO: 9676 - DNA, 55 bp, Artificial Sequence; identical to SEQ ID NO: 7446
  Synthetic polynucleotide

SEQ ID NO: 9677 - DNA, 55 bp, Artificial Sequence; identical to SEQ ID NO: 7798
  Synthetic polynucleotide

SEQ ID NO: 9678 - DNA, 55 bp, Artificial Sequence; identical to SEQ ID NO: 7139
  Synthetic polynucleotide

SEQ ID NO: 9679 - DNA, 55 bp, Artificial Sequence; identical to SEQ ID NO: 6872
  Synthetic polynucleotide

SEQ ID NO: 9680 - DNA, 55 bp, Artificial Sequence; identical to SEQ ID NO: 6691
  Synthetic polynucleotide

SEQ ID NO: 9681 - DNA, 55 bp, Artificial Sequence; identical to SEQ ID NO: 7530
  Synthetic polynucleotide

SEQ ID NO: 9682 - DNA, 55 bp, Artificial Sequence; identical to SEQ ID NO: 7556
  Synthetic polynucleotide

SEQ ID NO: 9683 - DNA, 55 bp, Artificial Sequence; identical to SEQ ID NO: 8046
  Synthetic polynucleotide

SEQ ID NO: 9684 - DNA, 55 bp, Artificial Sequence; identical to SEQ ID NO: 7859
  Synthetic polynucleotide

SEQ ID NO: 9685 - DNA, 55 bp, Artificial Sequence; identical to SEQ ID NO: 7103
  Synthetic polynucleotide

SEQ ID NO: 9686 - DNA, 55 bp, Artificial Sequence; identical to SEQ ID NO: 7013
  Synthetic polynucleotide

SEQ ID NO: 9687 - DNA, 55 bp, Artificial Sequence; identical to SEQ ID NO: 8012
  Synthetic polynucleotide

SEQ ID NO: 9688 - DNA, 55 bp, Artificial Sequence; identical to SEQ ID NO: 6718
  Synthetic polynucleotide

SEQ ID NO: 9689 - DNA, 55 bp, Artificial Sequence; identical to SEQ ID NO: 7150
  Synthetic polynucleotide

SEQ ID NO: 9690 - DNA, 55 bp, Artificial Sequence; identical to SEQ ID NO: 6972
  Synthetic polynucleotide

SEQ ID NO: 9691 - DNA, 55 bp, Artificial Sequence; identical to SEQ ID NO: 6941
  Synthetic polynucleotide

SEQ ID NO: 9692 - DNA, 55 bp, Artificial Sequence; identical to SEQ ID NO: 7687
  Synthetic polynucleotide

SEQ ID NO: 9693 - DNA, 55 bp, Artificial Sequence; identical to SEQ ID NO: 7919
  Synthetic polynucleotide

SEQ ID NO: 9694 - DNA, 55 bp, Artificial Sequence; identical to SEQ ID NO: 7548
  Synthetic polynucleotide

SEQ ID NO: 9695 - DNA, 55 bp, Artificial Sequence; identical to SEQ ID NO: 7224
  Synthetic polynucleotide

SEQ ID NO: 9696 - DNA, 55 bp, Artificial Sequence; identical to SEQ ID NO: 6915
  Synthetic polynucleotide

SEQ ID NO: 9697 - DNA, 55 bp, Artificial Sequence; identical to SEQ ID NO: 7955
  Synthetic polynucleotide

SEQ ID NO: 9698 - DNA, 55 bp, Artificial Sequence; identical to SEQ ID NO: 7328
  Synthetic polynucleotide

SEQ ID NO: 9699 - DNA, 55 bp, Artificial Sequence; identical to SEQ ID NO: 6828
  Synthetic polynucleotide

SEQ ID NO: 9700 - DNA, 55 bp, Artificial Sequence; identical to SEQ ID NO: 6971
  Synthetic polynucleotide

SEQ ID NO: 9701 - DNA, 55 bp, Artificial Sequence; identical to SEQ ID NO: 7816
  Synthetic polynucleotide

SEQ ID NO: 9702 - DNA, 55 bp, Artificial Sequence; identical to SEQ ID NO: 7697
  Synthetic polynucleotide

SEQ ID NO: 9703 - DNA, 55 bp, Artificial Sequence; identical to SEQ ID NO: 7839
  Synthetic polynucleotide

SEQ ID NO: 9704 - DNA, 55 bp, Artificial Sequence; identical to SEQ ID NO: 7509
  Synthetic polynucleotide

SEQ ID NO: 9705 - DNA, 55 bp, Artificial Sequence; identical to SEQ ID NO: 7202
  Synthetic polynucleotide

SEQ ID NO: 9706 - DNA, 55 bp, Artificial Sequence; identical to SEQ ID NO: 6742
  Synthetic polynucleotide

SEQ ID NO: 9707 - DNA, 55 bp, Artificial Sequence; identical to SEQ ID NO: 7099
  Synthetic polynucleotide

SEQ ID NO: 9708 - DNA, 55 bp, Artificial Sequence; identical to SEQ ID NO: 7068
  Synthetic polynucleotide

SEQ ID NO: 9709 - DNA, 55 bp, Artificial Sequence; identical to SEQ ID NO: 6703
  Synthetic polynucleotide

SEQ ID NO: 9710 - DNA, 55 bp, Artificial Sequence; identical to SEQ ID NO: 7467
  Synthetic polynucleotide

SEQ ID NO: 9711 - DNA, 55 bp, Artificial Sequence; identical to SEQ ID NO: 7817
  Synthetic polynucleotide

SEQ ID NO: 9712 - DNA, 55 bp, Artificial Sequence; identical to SEQ ID NO: 7586
  Synthetic polynucleotide

SEQ ID NO: 9713 - DNA, 55 bp, Artificial Sequence; identical to SEQ ID NO: 8066
  Synthetic polynucleotide

SEQ ID NO: 9714 - DNA, 55 bp, Artificial Sequence; identical to SEQ ID NO: 7647
  Synthetic polynucleotide

SEQ ID NO: 9715 - DNA, 55 bp, Artificial Sequence; identical to SEQ ID NO: 7193
  Synthetic polynucleotide

SEQ ID NO: 9716 - DNA, 55 bp, Artificial Sequence; identical to SEQ ID NO: 7112
  Synthetic polynucleotide

SEQ ID NO: 9717 - DNA, 55 bp, Artificial Sequence; identical to SEQ ID NO: 8029
  Synthetic polynucleotide

SEQ ID NO: 9718 - DNA, 55 bp, Artificial Sequence; identical to SEQ ID NO: 6989
  Synthetic polynucleotide

SEQ ID NO: 9719 - DNA, 55 bp, Artificial Sequence; identical to SEQ ID NO: 6800
  Synthetic polynucleotide

SEQ ID NO: 9720 - DNA, 55 bp, Artificial Sequence; identical to SEQ ID NO: 7038
  Synthetic polynucleotide

SEQ ID NO: 9721 - DNA, 55 bp, Artificial Sequence; identical to SEQ ID NO: 7998
  Synthetic polynucleotide

SEQ ID NO: 9722 - DNA, 55 bp, Artificial Sequence; identical to SEQ ID NO: 6923
  Synthetic polynucleotide

SEQ ID NO: 9723 - DNA, 55 bp, Artificial Sequence; identical to SEQ ID NO: 7801
  Synthetic polynucleotide

SEQ ID NO: 9724 - DNA, 55 bp, Artificial Sequence; identical to SEQ ID NO: 7477
  Synthetic polynucleotide

SEQ ID NO: 9725 - DNA, 55 bp, Artificial Sequence; identical to SEQ ID NO: 6676
  Synthetic polynucleotide

SEQ ID NO: 9726 - DNA, 55 bp, Artificial Sequence; identical to SEQ ID NO: 6616
  Synthetic polynucleotide

SEQ ID NO: 9727 - DNA, 55 bp, Artificial Sequence; identical to SEQ ID NO: 6875
  Synthetic polynucleotide

SEQ ID NO: 9728 - DNA, 55 bp, Artificial Sequence; identical to SEQ ID NO: 7734
  Synthetic polynucleotide

SEQ ID NO: 9729 - DNA, 55 bp, Artificial Sequence; identical to SEQ ID NO: 6767
  Synthetic polynucleotide

SEQ ID NO: 9730 - DNA, 55 bp, Artificial Sequence; identical to SEQ ID NO: 6708
  Synthetic polynucleotide

SEQ ID NO: 9731 - DNA, 55 bp, Artificial Sequence; identical to SEQ ID NO: 6951
  Synthetic polynucleotide

SEQ ID NO: 9732 - DNA, 55 bp, Artificial Sequence; identical to SEQ ID NO: 7367
  Synthetic polynucleotide

SEQ ID NO: 9733 - DNA, 55 bp, Artificial Sequence; identical to SEQ ID NO: 7531
  Synthetic polynucleotide

SEQ ID NO: 9734 - DNA, 55 bp, Artificial Sequence; identical to SEQ ID NO: 6671
  Synthetic polynucleotide

SEQ ID NO: 9735 - DNA, 55 bp, Artificial Sequence; identical to SEQ ID NO: 6806
  Synthetic polynucleotide

SEQ ID NO: 9736 - DNA, 55 bp, Artificial Sequence; identical to SEQ ID NO: 7462
  Synthetic polynucleotide

SEQ ID NO: 9737 - DNA, 55 bp, Artificial Sequence; identical to SEQ ID NO: 6593
  Synthetic polynucleotide

SEQ ID NO: 9738 - DNA, 55 bp, Artificial Sequence; identical to SEQ ID NO: 6580
  Synthetic polynucleotide

SEQ ID NO: 9739 - DNA, 55 bp, Artificial Sequence; identical to SEQ ID NO: 7636
  Synthetic polynucleotide

SEQ ID NO: 9740 - DNA, 55 bp, Artificial Sequence; identical to SEQ ID NO: 7896
  Synthetic polynucleotide

SEQ ID NO: 9741 - DNA, 55 bp, Artificial Sequence; identical to SEQ ID NO: 6779
  Synthetic polynucleotide

SEQ ID NO: 9742 - DNA, 55 bp, Artificial Sequence; identical to SEQ ID NO: 7596
  Synthetic polynucleotide

SEQ ID NO: 9743 - DNA, 55 bp, Artificial Sequence; identical to SEQ ID NO: 6603
  Synthetic polynucleotide

SEQ ID NO: 9744 - DNA, 55 bp, Artificial Sequence; identical to SEQ ID NO: 7848
  Synthetic polynucleotide

SEQ ID NO: 9745 - DNA, 55 bp, Artificial Sequence; identical to SEQ ID NO: 8024
  Synthetic polynucleotide

SEQ ID NO: 9746 - DNA, 55 bp, Artificial Sequence; identical to SEQ ID NO: 6669
  Synthetic polynucleotide

SEQ ID NO: 9747 - DNA, 55 bp, Artificial Sequence; identical to SEQ ID NO: 6644
  Synthetic polynucleotide

SEQ ID NO: 9748 - DNA, 55 bp, Artificial Sequence; identical to SEQ ID NO: 7369
  Synthetic polynucleotide

SEQ ID NO: 9749 - DNA, 55 bp, Artificial Sequence; identical to SEQ ID NO: 7523
  Synthetic polynucleotide

SEQ ID NO: 9750 - DNA, 55 bp, Artificial Sequence; identical to SEQ ID NO: 7376
  Synthetic polynucleotide

SEQ ID NO: 9751 - DNA, 55 bp, Artificial Sequence; identical to SEQ ID NO: 7451
  Synthetic polynucleotide

SEQ ID NO: 9752 - DNA, 55 bp, Artificial Sequence; identical to SEQ ID NO: 7407
  Synthetic polynucleotide

SEQ ID NO: 9753 - DNA, 55 bp, Artificial Sequence; identical to SEQ ID NO: 7396
  Synthetic polynucleotide

SEQ ID NO: 9754 - DNA, 55 bp, Artificial Sequence; identical to SEQ ID NO: 7566
  Synthetic polynucleotide

SEQ ID NO: 9755 - DNA, 55 bp, Artificial Sequence; identical to SEQ ID NO: 7408
  Synthetic polynucleotide

SEQ ID NO: 9756 - DNA, 55 bp, Artificial Sequence; identical to SEQ ID NO: 6882
  Synthetic polynucleotide

SEQ ID NO: 9757 - DNA, 55 bp, Artificial Sequence; identical to SEQ ID NO: 6561
  Synthetic polynucleotide

SEQ ID NO: 9758 - DNA, 55 bp, Artificial Sequence; identical to SEQ ID NO: 7479
  Synthetic polynucleotide

SEQ ID NO: 9759 - DNA, 55 bp, Artificial Sequence; identical to SEQ ID NO: 7488
  Synthetic polynucleotide

SEQ ID NO: 9760 - DNA, 55 bp, Artificial Sequence; identical to SEQ ID NO: 6780
  Synthetic polynucleotide

SEQ ID NO: 9761 - DNA, 55 bp, Artificial Sequence; identical to SEQ ID NO: 6640
  Synthetic polynucleotide

SEQ ID NO: 9762 - DNA, 55 bp, Artificial Sequence; identical to SEQ ID NO: 7768
  Synthetic polynucleotide

SEQ ID NO: 9763 - DNA, 55 bp, Artificial Sequence; identical to SEQ ID NO: 7821
  Synthetic polynucleotide

SEQ ID NO: 9764 - DNA, 55 bp, Artificial Sequence; identical to SEQ ID NO: 7482
  Synthetic polynucleotide

SEQ ID NO: 9765 - DNA, 55 bp, Artificial Sequence; identical to SEQ ID NO: 7842
  Synthetic polynucleotide

SEQ ID NO: 9766 - DNA, 55 bp, Artificial Sequence; identical to SEQ ID NO: 7084
  Synthetic polynucleotide

SEQ ID NO: 9767 - DNA, 55 bp, Artificial Sequence; identical to SEQ ID NO: 7247
  Synthetic polynucleotide

SEQ ID NO: 9768 - DNA, 55 bp, Artificial Sequence; identical to SEQ ID NO: 7478
  Synthetic polynucleotide

SEQ ID NO: 9769 - DNA, 55 bp, Artificial Sequence; identical to SEQ ID NO: 8065
  Synthetic polynucleotide

SEQ ID NO: 9770 - DNA, 55 bp, Artificial Sequence; identical to SEQ ID NO: 6845
  Synthetic polynucleotide

SEQ ID NO: 9771 - DNA, 55 bp, Artificial Sequence; identical to SEQ ID NO: 7242
  Synthetic polynucleotide

SEQ ID NO: 9772 - DNA, 55 bp, Artificial Sequence; identical to SEQ ID NO: 7397
  Synthetic polynucleotide

SEQ ID NO: 9773 - DNA, 55 bp, Artificial Sequence; identical to SEQ ID NO: 6591
  Synthetic polynucleotide

SEQ ID NO: 9774 - DNA, 55 bp, Artificial Sequence; identical to SEQ ID NO: 6910
  Synthetic polynucleotide

SEQ ID NO: 9775 - DNA, 55 bp, Artificial Sequence; identical to SEQ ID NO: 7664
  Synthetic polynucleotide

SEQ ID NO: 9776 - DNA, 55 bp, Artificial Sequence; identical to SEQ ID NO: 7385
  Synthetic polynucleotide

SEQ ID NO: 9777 - DNA, 55 bp, Artificial Sequence; identical to SEQ ID NO: 7503
  Synthetic polynucleotide

SEQ ID NO: 9778 - DNA, 55 bp, Artificial Sequence; identical to SEQ ID NO: 7764
  Synthetic polynucleotide

SEQ ID NO: 9779 - DNA, 55 bp, Artificial Sequence; identical to SEQ ID NO: 6792
  Synthetic polynucleotide

SEQ ID NO: 9780 - DNA, 55 bp, Artificial Sequence; identical to SEQ ID NO: 6619
  Synthetic polynucleotide

SEQ ID NO: 9781 - DNA, 55 bp, Artificial Sequence; identical to SEQ ID NO: 6924
  Synthetic polynucleotide

SEQ ID NO: 9782 - DNA, 55 bp, Artificial Sequence; identical to SEQ ID NO: 7448
  Synthetic polynucleotide

SEQ ID NO: 9783 - DNA, 55 bp, Artificial Sequence; identical to SEQ ID NO: 7223
  Synthetic polynucleotide

SEQ ID NO: 9784 - DNA, 55 bp, Artificial Sequence; identical to SEQ ID NO: 7434
  Synthetic polynucleotide

SEQ ID NO: 9785 - DNA, 55 bp, Artificial Sequence; identical to SEQ ID NO: 7461
  Synthetic polynucleotide

SEQ ID NO: 9786 - DNA, 55 bp, Artificial Sequence; identical to SEQ ID NO: 6578
  Synthetic polynucleotide

SEQ ID NO: 9787 - DNA, 55 bp, Artificial Sequence; identical to SEQ ID NO: 7110
  Synthetic polynucleotide

SEQ ID NO: 9788 - DNA, 55 bp, Artificial Sequence; identical to SEQ ID NO: 7965
  Synthetic polynucleotide

SEQ ID NO: 9789 - DNA, 55 bp, Artificial Sequence; identical to SEQ ID NO: 6980
  Synthetic polynucleotide

SEQ ID NO: 9790 - DNA, 55 bp, Artificial Sequence; identical to SEQ ID NO: 7757
  Synthetic polynucleotide

SEQ ID NO: 9791 - DNA, 55 bp, Artificial Sequence; identical to SEQ ID NO: 6842
  Synthetic polynucleotide

SEQ ID NO: 9792 - DNA, 55 bp, Artificial Sequence; identical to SEQ ID NO: 6531
  Synthetic polynucleotide

SEQ ID NO: 9793 - DNA, 55 bp, Artificial Sequence; identical to SEQ ID NO: 7765
  Synthetic polynucleotide

SEQ ID NO: 9794 - DNA, 55 bp, Artificial Sequence; identical to SEQ ID NO: 7400
  Synthetic polynucleotide

SEQ ID NO: 9795 - DNA, 55 bp, Artificial Sequence; identical to SEQ ID NO: 6994
  Synthetic polynucleotide

SEQ ID NO: 9796 - DNA, 55 bp, Artificial Sequence; identical to SEQ ID NO: 7849
  Synthetic polynucleotide

SEQ ID NO: 9797 - DNA, 55 bp, Artificial Sequence; identical to SEQ ID NO: 7667
  Synthetic polynucleotide

SEQ ID NO: 9798 - DNA, 55 bp, Artificial Sequence; identical to SEQ ID NO: 7100
  Synthetic polynucleotide

SEQ ID NO: 9799 - DNA, 55 bp, Artificial Sequence; identical to SEQ ID NO: 7001
  Synthetic polynucleotide

SEQ ID NO: 9800 - DNA, 55 bp, Artificial Sequence; identical to SEQ ID NO: 7222
  Synthetic polynucleotide

SEQ ID NO: 9801 - DNA, 55 bp, Artificial Sequence; identical to SEQ ID NO: 7494
  Synthetic polynucleotide

SEQ ID NO: 9802 - DNA, 55 bp, Artificial Sequence; identical to SEQ ID NO: 7087
  Synthetic polynucleotide

SEQ ID NO: 9803 - DNA, 55 bp, Artificial Sequence; identical to SEQ ID NO: 7392
  Synthetic polynucleotide

SEQ ID NO: 9804 - DNA, 55 bp, Artificial Sequence; identical to SEQ ID NO: 7382
  Synthetic polynucleotide

SEQ ID NO: 9805 - DNA, 55 bp, Artificial Sequence; identical to SEQ ID NO: 6829
  Synthetic polynucleotide

SEQ ID NO: 9806 - DNA, 55 bp, Artificial Sequence; identical to SEQ ID NO: 7545
  Synthetic polynucleotide

SEQ ID NO: 9807 - DNA, 55 bp, Artificial Sequence; identical to SEQ ID NO: 6880
  Synthetic polynucleotide

SEQ ID NO: 9808 - DNA, 55 bp, Artificial Sequence; identical to SEQ ID NO: 7215
  Synthetic polynucleotide

SEQ ID NO: 9809 - DNA, 55 bp, Artificial Sequence; identical to SEQ ID NO: 7616
  Synthetic polynucleotide

SEQ ID NO: 9810 - DNA, 55 bp, Artificial Sequence; identical to SEQ ID NO: 7056
  Synthetic polynucleotide

SEQ ID NO: 9811 - DNA, 55 bp, Artificial Sequence; identical to SEQ ID NO: 7600
  Synthetic polynucleotide

SEQ ID NO: 9812 - DNA, 55 bp, Artificial Sequence; identical to SEQ ID NO: 8017
  Synthetic polynucleotide

SEQ ID NO: 9813 - DNA, 55 bp, Artificial Sequence; identical to SEQ ID NO: 7512
  Synthetic polynucleotide

SEQ ID NO: 9814 - DNA, 55 bp, Artificial Sequence; identical to SEQ ID NO: 7428
  Synthetic polynucleotide

SEQ ID NO: 9815 - DNA, 55 bp, Artificial Sequence; identical to SEQ ID NO: 6849
  Synthetic polynucleotide

SEQ ID NO: 9816 - DNA, 55 bp, Artificial Sequence; identical to SEQ ID NO: 7695
  Synthetic polynucleotide

SEQ ID NO: 9817 - DNA, 55 bp, Artificial Sequence; identical to SEQ ID NO: 7662
  Synthetic polynucleotide

SEQ ID NO: 9818 - DNA, 55 bp, Artificial Sequence; identical to SEQ ID NO: 6680
  Synthetic polynucleotide

SEQ ID NO: 9819 - DNA, 55 bp, Artificial Sequence; identical to SEQ ID NO: 7544
  Synthetic polynucleotide

SEQ ID NO: 9820 - DNA, 55 bp, Artificial Sequence; identical to SEQ ID NO: 6944
  Synthetic polynucleotide

SEQ ID NO: 9821 - DNA, 55 bp, Artificial Sequence; identical to SEQ ID NO: 7483
  Synthetic polynucleotide

SEQ ID NO: 9822 - DNA, 55 bp, Artificial Sequence; identical to SEQ ID NO: 7877
  Synthetic polynucleotide

SEQ ID NO: 9823 - DNA, 55 bp, Artificial Sequence; identical to SEQ ID NO: 7758
  Synthetic polynucleotide

SEQ ID NO: 9824 - DNA, 55 bp, Artificial Sequence; identical to SEQ ID NO: 6843
  Synthetic polynucleotide

SEQ ID NO: 9825 - DNA, 55 bp, Artificial Sequence; identical to SEQ ID NO: 7456
  Synthetic polynucleotide

SEQ ID NO: 9826 - DNA, 55 bp, Artificial Sequence; identical to SEQ ID NO: 6999
  Synthetic polynucleotide

SEQ ID NO: 9827 - DNA, 55 bp, Artificial Sequence; identical to SEQ ID NO: 8115
  Synthetic polynucleotide

SEQ ID NO: 9828 - DNA, 55 bp, Artificial Sequence; identical to SEQ ID NO: 7167
  Synthetic polynucleotide

SEQ ID NO: 9829 - DNA, 55 bp, Artificial Sequence; identical to SEQ ID NO: 7805
  Synthetic polynucleotide

SEQ ID NO: 9830 - DNA, 55 bp, Artificial Sequence; identical to SEQ ID NO: 7730
  Synthetic polynucleotide

SEQ ID NO: 9831 - DNA, 55 bp, Artificial Sequence; identical to SEQ ID NO: 7267
  Synthetic polynucleotide

SEQ ID NO: 9832 - DNA, 55 bp, Artificial Sequence; identical to SEQ ID NO: 7040
  Synthetic polynucleotide

SEQ ID NO: 9833 - DNA, 55 bp, Artificial Sequence; identical to SEQ ID NO: 7127
  Synthetic polynucleotide

SEQ ID NO: 9834 - DNA, 55 bp, Artificial Sequence; identical to SEQ ID NO: 6895
  Synthetic polynucleotide

SEQ ID NO: 9835 - DNA, 55 bp, Artificial Sequence; identical to SEQ ID NO: 7132
  Synthetic polynucleotide

SEQ ID NO: 9836 - DNA, 55 bp, Artificial Sequence; identical to SEQ ID NO: 7652
  Synthetic polynucleotide

SEQ ID NO: 9837 - DNA, 55 bp, Artificial Sequence; identical to SEQ ID NO: 7779
  Synthetic polynucleotide

SEQ ID NO: 9838 - DNA, 55 bp, Artificial Sequence; identical to SEQ ID NO: 7475
  Synthetic polynucleotide

SEQ ID NO: 9839 - DNA, 55 bp, Artificial Sequence; identical to SEQ ID NO: 7162
  Synthetic polynucleotide

SEQ ID NO: 9840 - DNA, 55 bp, Artificial Sequence; identical to SEQ ID NO: 7261
  Synthetic polynucleotide

SEQ ID NO: 9841 - DNA, 55 bp, Artificial Sequence; identical to SEQ ID NO: 7246
  Synthetic polynucleotide

SEQ ID NO: 9842 - DNA, 55 bp, Artificial Sequence; identical to SEQ ID NO: 6609
  Synthetic polynucleotide

SEQ ID NO: 9843 - DNA, 55 bp, Artificial Sequence; identical to SEQ ID NO: 7109
  Synthetic polynucleotide

SEQ ID NO: 9844 - DNA, 55 bp, Artificial Sequence; identical to SEQ ID NO: 7391
  Synthetic polynucleotide

SEQ ID NO: 9845 - DNA, 55 bp, Artificial Sequence; identical to SEQ ID NO: 7811
  Synthetic polynucleotide

SEQ ID NO: 9846 - DNA, 55 bp, Artificial Sequence; identical to SEQ ID NO: 7939
  Synthetic polynucleotide

SEQ ID NO: 9847 - DNA, 219 bp, Artificial Sequence
  Synthetic polynucleotide
ggagtggggaggggtatcttgggcctagctaagttgtgtttttctttttcatttcacagggtccttctggtcctgttggtcctgctggtgctgttggccctgctggtgctgttggcccaagaggtcctagtgtatgtacatgctgaagatttctttgcaacactaacatttagagagaatcagtccaaaacatctgttaagaaaataaacaatatatca

SEQ ID NO: 9848 - DNA, 218 bp, Artificial Sequence
  Synthetic polynucleotide
gcctcgtacgggccgtacacacgcgtgcagagcatggcgctgccccccggcgtagtgaactcgtacaatggcctgggaggcccgccggccgcacccccgccccggccgcacccccgcctccgccgcacccccacccgcatccgcacgcacaccatctgcacgcggccgccgcaccgccgcctgccccaccgcaccacggggccgccgcgccgccgccg

SEQ ID NO: 9849 - DNA, 218 bp, Artificial Sequence
  Synthetic polynucleotide
ctcgtacgggccgtacacacgcgtgcagagcatggcgctgccccccggcgtagtgaactcgtacaatggcctgggaggcccgccggccgcacccccgcctcggccgcacccccgcctccgccgcacccccacccgcatccgcacgcacaccatctgcacgcggccgccgcaccgccgcctgccccaccgcaccacggggccgccgcgccgccgccggg

SEQ ID NO: 9850 - DNA, 229 bp, Artificial Sequence
  Synthetic polynucleotide
cccctctgaagacaaggaggacattgaaagcaacctgctccggcccacaggcgtagccctgcgaggagcccacttctgcctgaaggtcttccgggccgaggacttgccgcagagggacttgccgcagagtgcgtggggcgcgcccttgggtgggaggtctgcaggaggctggaggcgcagggctggtgggggtgggcgatggcgggcggggtcagctccctgggggaag

SEQ ID NO: 9851 - DNA, 219 bp, Artificial Sequence
  Synthetic polynucleotide
aaatctgactggactgtgtgtgtctctcctctgtgtcccccagggcccgtcacagctggagctgactctccaggcatccaagcaaaatggcacctggccccaaaatggcacctggccccgagaggtgcttctggtcctcagtgtaaacagcagtgtcttcctgcatctccaggccctgggaatcccactgcacttggcctacgtgagtgtgttccctcc

SEQ ID NO: 9852 - DNA, 219 bp, Artificial Sequence
  Synthetic polynucleotide
gcagtgcctacgtctaagctgggccaggcagaggggcgagatgcaggctcagcaccctccggaggggacccggccttcctgggcatggccgtgagcacccgcatggccgtgagcaccctgtgtggcgaggtgccgctctactacatctaggacgcctccggtgagcaggtgtgatcccagggcccctgatcagcagcggaggagcgctcgggccacctg

SEQ ID NO: 9853 - DNA, 220 bp, Artificial Sequence
  Synthetic polynucleotide
gcgcgactgcgtcacctaccagactgagtaccgctgggaggtgtatcgcaccgccagctgccagcggccggggcgcccagcgcgtgtggccctgcccggcgcgtgtggccctgcccggcgtggacgtgagccggcctcggctggtgctgccgcggctggcgctgcctgtggggcactactgctttgtgtttgtcgtgtcatttggggacacgccactgac

SEQ ID NO: 9854 - DNA, 221 bp, Artificial Sequence
  Synthetic polynucleotide
cggggtggggcttcgtactaacctcgtcccctaagccccgcccctgccccaggttctcctggagctgctgccgcgcctcctgggctccccgccgccgcccggggctccccgccgccgcccgaggccccccgggccgcctcgcccccaaggcgggcgtcgtcggtgggcttattgctccgcgcggaggagctgatactgaaaaagccacggagcgagctcgt

SEQ ID NO: 9855 - DNA, 220 bp, Artificial Sequence
  Synthetic polynucleotide
ctcgactgtgcagggggtggaggtgggcccagcgccgcagggcgaggccttcagcctggagagctgccagaactggctgcccggggagccacacccagccaggggagccacacccagccacagccgagcactgcgtccggctcgggcccaccgggtggtgtaacaccgacctgtgctcagcgccgcacagctacgtctgcgagctgcagcccggaggtgt

SEQ ID NO: 9856 - DNA, 215 bp, Artificial Sequence
  Synthetic polynucleotide
agggggggccctggggcgccccctcccgggcactccctgagggctgcacggcaccgccacaggcactgcacccgttcgcggcggacgacacctgccggacgacacctgccggaccagccagggctccccggctttccagccgcccgagattgccaacggcctggacaccttctccggcttcaaggtggacatctggtcggctggggtcaccctgt

SEQ ID NO: 9857 - DNA, 221 bp, Artificial Sequence
  Synthetic polynucleotide
aggctggaggctgatgcaaatcaggtgctggagtgggtacgggcaccacctcacgtccgatttccagctcgccaggcctggtaccggccagccagccccggtaccggccagccagccccgaaagcctgcattaccacttgtgcagtgccccccgggccctgctgcaggatgtgctgcctaagtatatcctggacttctccctctttgcctacccactgcct

SEQ ID NO: 9858 - DNA, 216 bp, Artificial Sequence
  Synthetic polynucleotide
cggctgcgggcctgggccctcggccccactgaccctcttctctgcacagctcctaagccactgcctgctggtgaccctggccgcccacctccccgccgagcacctccccgccgagttcacccctgcggtgcacgcctccctggacaagttcctggcttctgtgagcaccgtgctgacctccaaataccgttaagctggagcctcggtggccatgct

SEQ ID NO: 9859 - DNA, 218 bp, Artificial Sequence
  Synthetic polynucleotide
ttaaacatggatttttgaaaagtggattgaagacaaatctggttctttcctattagaaaatcaaagaaattacttatatgcactctgaaggcatccttgctctgaaggcatccttgctggtgaattgaaacatggccctctggctttggtggataaattgatgcctgtgatcatgatcatcatgagagatcacacttatgccaagtgtcagaatgctc

SEQ ID NO: 9860 - DNA, 218 bp, Artificial Sequence
  Synthetic polynucleotide
gtgaaatcacaaaggagcgagaagatgagtgttttagttgtggggatgctggccagctcgtctcctgcaagaaaccaggctgcccaaaagtttaccacgcccaaaagtttaccacgcagactgtctcaatctgaccaagcgaccagcaggttggtgccaaaatccatttgtaccgctactcgttctctccatcatactcagggtctcatgccatttgc

SEQ ID NO: 9861 - DNA, 215 bp, Artificial Sequence; identical to SEQ ID NO: 9856
  Synthetic polynucleotide

SEQ ID NO: 9862 - DNA, 218 bp, Artificial Sequence
  Synthetic polynucleotide
cagcagcagcagcagcaacagcagcagcagcagcaggaggcggcggcggcggctgcggcggcggcggcggctgcggcggcggcagctgcagtgccccggtagctgcagtgccccggttgcggccgccccacgacaaccgcaccatggtggagatcatcgccgaccacccggccgaactcgtccgcaccgacagccccaacttcctgtgctcggtgctg

SEQ ID NO: 9863 - DNA, 209 bp, Artificial Sequence
  Synthetic polynucleotide
tgcacctgcagctgctggcccaagctgactacagactcagcgatgtgatgcgagaatcactgctggaagaccagctcagccctgtcctcactgaaccccacaaccccacctccttgccctggatcgaaggctccaaaccatcctaaggacagtggaggggtgcatagtggcccatggacagcagagtgtcatagtcgacggcccagtgg

SEQ ID NO: 9864 - DNA, 217 bp, Artificial Sequence
  Synthetic polynucleotide
ccacagtgtatcggctagcctatctccggctaaatacactttgtgaacgccttctgtctgagcacccagaattagaacatatcatctggacccttttccatctggacccttttccagcacaccctgcagaatgagtatgaactcatgagagacaggcatttggaccaagtaagaaaatcaagcacttcaccttctctcctccctacttacttgttaa

SEQ ID NO: 9865 - DNA, 209 bp, Artificial Sequence
  Synthetic polynucleotide
gatgactttttcgtgttgaagttaactgaataacagctttctcagccaaggcaaagacacattgatttggttcttcctttgtagagagtgttcatctgggaatctgggacttggatgagacaatcattgttttccactccttgcttactgggtcctacgccaacagatatgggagggtgagtaccaagaggcatcagtttttaatttct

SEQ ID NO: 9866 - DNA, 220 bp, Artificial Sequence
  Synthetic polynucleotide
ggtcgtgcagacccgggagaaagatgtcaaacgtgcgagtgtctaacgggagccctagcctggagcggatggacgccaggcaggcggagcaccccaagccaggcggagcaccccaagccctcggcctgcaggaacctcttcggcccggtggaccacgaagagttaacccgggacttggagaagcactgcagagacatggaagaggcgagccagcgcaagt

SEQ ID NO: 9867 - DNA, 220 bp, Artificial Sequence
  Synthetic polynucleotide
cagtgagagctgtgaatgaattctccgggtggacgagggaagaagaaaggctccggcggcgccagcaacccggtgcctcccaggcctccgcccccttgccaggcctccgcccccttgcctggcccccgcccctcccgccgccgggccggcccctccgcccgagtcgccgcataagcggaacctgtactatttctcctacccgctgtttgtaggcttcgcg

SEQ ID NO: 9868 - DNA, 229 bp, Artificial Sequence
  Synthetic polynucleotide
tcaagatgtaaatgaattatatgaagattttgttactttaaaattatttacatattctactcactagggatctccaggataccaaggaccccctggtgaacctgggcaagctggacctgggcaagctggtccttcagtaagtaacaattaaatttatatttagtaagtcgataattccatatggaacctacctttgttttctaaaacaagtataggtctttacagaatg

SEQ ID NO: 9869 - DNA, 214 bp, Artificial Sequence
  Synthetic polynucleotide
cttgtcattgtttaatgcatacttaaacaattttatttttgtcttgaaattattaataatgtggttttctgtccacttcccctatgcaggtgtccaacggaggtgtccaacggatgtgtgagtaaaattctgggcaggtattacgagactggctccatcagacccagggcaatcggtggtagtaaaccgagagtagcgactccagaagttgtaa

SEQ ID NO: 9870 - DNA, 221 bp, Artificial Sequence
  Synthetic polynucleotide
gtttcagcactctacccagaccctcccggccccagggtccacacgtgctcggccgcaggaggcttcagcaccagcgattacgacgttggctgggagagtccgacgttggctgggagagtcctcacaatggctcggggacgtgggcctattcagcgccggatctgctggggtgagcagagcgagggccccgggcgtctacgccaaggacaagggagtagttc

SEQ ID NO: 9871 - DNA, 208 bp, Artificial Sequence
  Synthetic polynucleotide
tcactacttccccatctcccacatccggctatgggccctgcagctgatcttcgtgtccacgccagcgctcctagtggccatgcacgtggcctaccggagaccggagacatgagaagaagaggaagttcatcaagggggagataaagagtgaatttaaggacatcgaggagatcaaaacccagaaggtccgcatcgaaggctccctgtg

SEQ ID NO: 9872 - DNA, 212 bp, Artificial Sequence
  Synthetic polynucleotide
agtaataatgatttgaacaccactgagaagcgtgcagctgagaggcatccagaaaagtatcagggtagttctgtttcaaacttgcatgtggagccatgtgggagccatgtggcacaaatactcatgccagctcattacagcatgagaacagcagtttattactcactaaagacagaatgaatgtagaaaaggctgaattctgtaataaaagc

SEQ ID NO: 9873 - DNA, 220 bp, Artificial Sequence
  Synthetic polynucleotide
gctgatacagagggaggtcccctaactgttgaccttgtgaacagtaaggtcgttgtttcgttctgcagagagacggtgtccatcagcatccgggcctcccttcagcatccgggcctccctgcagcagacccaggctgtccctcttttgatggctcatcagtacctccgcggaagtgtagaaacccaggtgaccatcgcgacggccatcctcgcgggcgtc

SEQ ID NO: 9874 - DNA, 216 bp, Artificial Sequence
  Synthetic polynucleotide
tgcttgctgacgtggctctccatctcttcccagaaaaaattgcctgtgtcgtcccttcagaatgtgagaaatattgcggtaccaaggttggctgtaccaaggttggctgtaccaacatcgcctatccaaccttagtggtggagctcatgcccaatggtgagattctttcttgggaggttggtagagtctttcttgggaggctgattgggtttaggc

SEQ ID NO: 9875 - DNA, 216 bp, Artificial Sequence; identical to SEQ ID NO: 9858
  Synthetic polynucleotide

SEQ ID NO: 9876 - DNA, 220 bp, Artificial Sequence
  Synthetic polynucleotide
aaatagcccagtataagcgggagtgcccgtccatctttgcttgggaaatccgagacagattactgtccgagggggtctgtaccaacgataacataccaagccaacgataacataccaagcgtaagttcattgagaacatctgccctccctgccctaagcccaatgctctctcctctttacctcctcccaccctctctctccactgtctcttagtctgtgt

SEQ ID NO: 9877 - DNA, 217 bp, Artificial Sequence
  Synthetic polynucleotide
aaatgctacagctttgaggctaaatcatatgtcaaataaaactacttcatcaaaaaacatggaaatggtccaacagaaaaaagagggccccattccaccagggccccattccaccagatgcacaaaatccagatatgtcgttctttaagatgctattcttgccagaatcagcaaggtggatacaaaggactcatggaaagaactctctgaactctgg

SEQ ID NO: 9878 - DNA, 218 bp, Artificial Sequence
  Synthetic polynucleotide
atgagccctaccacctgcaccctgaggaaacacaagaccaatcggaagccgcgcacgccctttaccacatcccagctcctcgccctggagcgcaagttcccctggagcgcaagttccgtcagaaacagtacctctccattgcagagcgtgcagagttctccagctctctgaacctcacagagacccaggtcaaaatctggttccagaaccgaagggcc

SEQ ID NO: 9879 - DNA, 215 bp, Artificial Sequence
  Synthetic polynucleotide
gtgcctcctttaaactgttttcatctcacaaggatgttagtagaaagtaaacagaagagtcatatctgttttcacagcccaattatacagaaatccgacagcagaaatccgacagtactgcaatcactggcgaaattttgctgacattgatgattcctggaaaagtataaagagtatcttggactggacatcttttaaccaggagagaattgttg

SEQ ID NO: 9880 - DNA, 217 bp, Artificial Sequence
  Synthetic polynucleotide
cagcgctgtaggggtctttacgtgttccaaggggacagtagcccctgctcggccttcgagttccactgcctaagtggcgagtgcatccactccagctggcatccactccagctggcgctgtgatggtggccccgactgcaaggacaaatctgacgaggaaaactgcggtatgggcggggccagggtgggggcggggcgtcctatcacctgtccctgg

SEQ ID NO: 9881 - DNA, 219 bp, Artificial Sequence
  Synthetic polynucleotide
tcctttcttccctctctccaccagagcgatcgcctcaccggcccatcctccaagccggactgccggcaaatgcctccacagtggtcggaggagacgtagaggtcggaggagacgtagagtttgtctgcaaggtttacagtgatgcccagccccacatccagtggatcaagcacgtggaaaagaacggcagtaaatacgggcccgacgggctgccctacc

SEQ ID NO: 9882 - DNA, 217 bp, Artificial Sequence; identical to SEQ ID NO: 9864
  Synthetic polynucleotide

SEQ ID NO: 9883 - DNA, 218 bp, Artificial Sequence
  Synthetic polynucleotide
ggaagtgcgagccaaggaccaggacatcttggatctggtgggtgtgctgcacgatcccgagactctgcttcgctgcatcgctgaaagggccttcctgaggaaagggccttcctgaggcacctggtagggcctgtgctccacctgtggagggctggggacttggagagctgggaaaggtggcagggaagatttcttacatgaatgctctgtatacagtg

SEQ ID NO: 9884 - DNA, 217 bp, Artificial Sequence
  Synthetic polynucleotide
taagcatgtaatagagtgtgctaaacagaaagccctggaacttgaggagtttcagtatattggagaatcgcaaggatatgatatcatggaaccagcagcacatggaaccagcagcaaagaagtgctatctggaaagagaggtttgtcagtttgttttcatagtttaacttagcttctctattattacataaacaggacactaagatgaaggtttttt

SEQ ID NO: 9885 - DNA, 218 bp, Artificial Sequence
  Synthetic polynucleotide
ggtgaggagcatgggggagatgaggagccacgggccttgtgttgttacagagtttgctgtcatcgtggaggtccacgcagccgcacgttccaccctccaccacgttccaccctccaccctgtggggtgtgaggatgaccagtctctcagcaagtacgagtttgtggtgaccagtgggagccctgtagctgcagaccgaggtgggtgcccccaggcaga

SEQ ID NO: 9886 - DNA, 217 bp, Artificial Sequence
  Synthetic polynucleotide
gtgcctgccaggggggaggctcctaaggcccaccccggtgttttccccgccagctgccttctgccagagcctgggcgccgccgcccccgaggtccgctgctcccgaggtccgctgctgtgtggatgccgtgaacttcgtggccgagagcacgagagatcaggaggccaccggcgaggtgggacaggagccagaggcgggtggagcgaggcagaggcc

SEQ ID NO: 9887 - DNA, 219 bp, Artificial Sequence; identical to SEQ ID NO: 9851
  Synthetic polynucleotide

SEQ ID NO: 9888 - DNA, 214 bp, Artificial Sequence
  Synthetic polynucleotide
ccgaaagcccgctacctgctctgccagctgctgctgccaccttcctcatggagcaacatgagccccggaccccagctctggcacttgcttcaggcccttgcttcaggcccttgtgtctatgtgtataagaatctcagaccctacttcaagttcagcctgccccaattgcctccaaatcctctggaacaagacctttggaaccaggccaaagagg

SEQ ID NO: 9889 - DNA, 215 bp, Artificial Sequence
  Synthetic polynucleotide
agattctgaagctgaagttcccaagaacagaagaagaaagacggatgcggacccaaagtaaaaggaggctagaagctaagaaagagcagcggcagaaaaacagcggcagaaaaactttgtggacctggcctgcgagtgcagcgcagtcatctgctgccgcgtcacccccaagcagaaggccatggtggtggacctggtgaagaggtacaagaaag

SEQ ID NO: 9890 - DNA, 225 bp, Artificial Sequence
  Synthetic polynucleotide
ctccacattctctgccttttcatctctctctgctcggcccagaacacgatcgtgaatgagctggtacgtgtgaccagtgagggagctggcctgcagctgcagaaggtgactgcagaaggtgactgtcctgggcgtggccacggcgccccagcaggtcctctccaacggtgtccctgtctccaacttcacctacagccccgacaccaaggcaagagggcccagagt

SEQ ID NO: 9891 - DNA, 225 bp, Artificial Sequence
  Synthetic polynucleotide
ccctgtttctgtgtttttggcaggatgcaacctgaagatcttcaacaaccaggagttcgctgccctcctggcccagtcggtcaaccagggctttgaggctgtctaccagttgtgtctaccagttgacccgaatgtgcaccatccgcatgagcttcgtcaaaggctggggagcggagtacaggtcagttatgggtgctgcctacatcaggggacccaactccaggt

SEQ ID NO: 9892 - DNA, 219 bp, Artificial Sequence
  Synthetic polynucleotide
tagcccctgctcggccttcgagttccactgcctaagtggcgagtgcatccactccagctggcgctgtgatggtggccccgactgcaaggacaaatctgactgcaaggacaaatctgacgaggaaaactgcggtatgggcggggccagggtgggggcggggcgtcctatcacctgtccctgggctcccccaggtgtgggacatgcagtgatttaggtgcc

SEQ ID NO: 9893 - DNA, 217 bp, Artificial Sequence
  Synthetic polynucleotide
tgtattataacaatttataatcttcacaggccaatcacacaagctggaagacccattacaggtttcctcaggcccagcacgcagagtggaaggccaggcaggtggaaggccaggcactatggaacaggctatcagaacacccagaaccgcctacacagcccgccctatcaccagctcctccggaagatttgtcaggctgggaacggtaaattctatc

SEQ ID NO: 9894 - DNA, 211 bp, Artificial Sequence
  Synthetic polynucleotide
gtttggcatcttcctctacatgggggtcacgtcgctcagcggcatccagctctttgaccgcatcttgcttctgttcaagccacccaagtatcacccagatgcacccagatgtgccctacgtcaagcgggtacaggacccttttctggctgcccagcctggggtggtagagggtgctggggtgtgataggcactgaccccagcctccgcctg

SEQ ID NO: 9895 - DNA, 221 bp, Artificial Sequence; identical to SEQ ID NO: 9870
  Synthetic polynucleotide

SEQ ID NO: 9896 - DNA, 213 bp, Artificial Sequence
  Synthetic polynucleotide
cagggtgcgcgcagctccatctccatcctggagcaggagaaggtcgtcgcgcagcagatccggcagctcttccccaagttcgcggacacccccatttacacccccatttacaacgacgaggcggacccgctggtgggctggtccctgccacagccgtggagggcggacgtgacctacgcggccatggtggtgaaggtgggccggcccaacgcc

SEQ ID NO: 9897 - DNA, 208 bp, Artificial Sequence
  Synthetic polynucleotide
gtactatgaggaggcaagaagcgcctacctgagcaaggagctggcctccctgttgagggctggaggcgtcctggcctatgagctgctgccggcactggacactggacgaggtgctggctagtgacagccgcttcttgctgggcagctggctagagcaggcccgagcagcggcagtcagtgaggccgaggccgatttctacgagcagaa

SEQ ID NO: 9898 - DNA, 225 bp, Artificial Sequence
  Synthetic polynucleotide
gattagagcccacctggaaacccttcatcctcacgcagttctctcgccacacagcaacactgctttccccactcaaccagagccggtgcctgacttacctcacggtgggccttcacggtgggcctcgctggagattttattggtatagcgcagaacctccagctccatatccgtcttaaacactcggcttcagagacagaagaacaaagcagcaaatcagtgact

SEQ ID NO: 9899 - DNA, 216 bp, Artificial Sequence
  Synthetic polynucleotide
gtgtgtcagctcatcttccagatcacaccgctgaacgtgacccagtggctgatggtgctgaaaatctccttgcccgtgattctcatggatgagacgctcatggatgagacgctcaagtttgtggcccgcaactacctggaacctggtaaagagtgtgtgcagcctgccaccaaatcctgctcgttctcggcatgcaccgatgggatttcctggccg

SEQ ID NO: 9900 - DNA, 220 bp, Artificial Sequence; identical to SEQ ID NO: 9867
  Synthetic polynucleotide

SEQ ID NO: 9901 - DNA, 218 bp, Artificial Sequence
  Synthetic polynucleotide
aggggcatccccatcgagcgagtcgtctcctcggagggtggccggccctctgtggacctctccttccagccctcgcagcccctgagcaagtccagctcctgagcaagtccagctcctctcccgagctgcagactctgcaggacatcctcggggaccctggggacaaggccgacgtgggccggctgagccctgaggttaaggcccggtcacagtcaggg

SEQ ID NO: 9902 - DNA, 215 bp, Artificial Sequence
  Synthetic polynucleotide
tcttttctattctttcgttttataggcgaatgtttcctccatttaaagtgagatgttctgggctggataaaaaagccaaatacattttattgatggacatttattgatggacattatagctgctgatgactgtcgttataaatttcacaattctcggtggatggtggctggtaaggccgaccccgaaatgccaaagaggatgtacattcacccgg

SEQ ID NO: 9903 - DNA, 217 bp, Artificial Sequence
  Synthetic polynucleotide
ttcctggagactcacttcctagatgaggaagtgaagcttatcaagaagatgggtgaccacctgaccaacctccacaggctgggtggcccggaggctgggcggcccggaggctgggctgggcgagtatctcttcgaaaggctcactctcaagcacgactaagagccttctgagcccagcgacttctgaagggccccttgcaaagtaatagggcttctg

SEQ ID NO: 9904 - DNA, 215 bp, Artificial Sequence
  Synthetic polynucleotide
tgcccggtgctcacctgtggtcccgccagcttccagtgcaacagctccacctgcatcccccagctgtgggcctgcgacaacgaccccgactgcgaagatggctcggaggctcggatgagtggccgcagcgctgtaggggtctttacgtgttccaaggggacagtagcccctgctcggccttcgagttccactgcctaagtggcgagtgcatccac

SEQ ID NO: 9905 - DNA, 220 bp, Artificial Sequence
  Synthetic polynucleotide
actaactacgtctgttgtctggtcagctctttgacaaaattgccatcctgagcttcggagagctgattttctgtggcacgccagcggaaatgcttgatttcagcggaaatgcttgatttcttcaatgactgcggttacccttgtcctgaacattcaaacccttttgacttctatagtaagtttttctttcacattccccatcatgaatgttttttaaact

SEQ ID NO: 9906 - DNA, 211 bp, Artificial Sequence
  Synthetic polynucleotide
catggaagggtgaggccttgaggttgaggtgggggtgttggctgggggagctgccatgtatgcagttaccagaacgtggcgctggctttgcttccagggacttccagggagtgtgtggggaagacggtgacattgcagggcaacctggacccctgtgccttgtatgcatctgaggtaacagccagggcccctctgtgtgtctgttactgtg

SEQ ID NO: 9907 - DNA, 218 bp, Artificial Sequence; identical to SEQ ID NO: 9849
  Synthetic polynucleotide

SEQ ID NO: 9908 - DNA, 216 bp, Artificial Sequence
  Synthetic polynucleotide
caggcggcacagggcgggcagctcttcgattacatccaggcagtctctagctacctggcaccgcccgtgtccgccgtcttcgtgctggcgctcttcgtgctggcgctcttcgtgccgcgcgttaatgagcaggtgagcggcacgcgcgtggtgacggcagggctgggcttgcacatcctcagcaggctgacctgtttccttcgcagggcgccttct

SEQ ID NO: 9909 - DNA, 227 bp, Artificial Sequence
  Synthetic polynucleotide
gcacgcaccctcctcgtaaggcgtgtactccactttgtacatgccatcgccacggtcctgaacgtaggtctccgtcaggttgcctgaggggttggccacacgggccttgacgtacgggccttgacgtgcggccctccggtctgtgtcagagcccgggcgtccacactgaactcagtggtggcctcacggaagacacctgcaaaggcacagagaggaggcttggggct

SEQ ID NO: 9910 - DNA, 216 bp, Artificial Sequence
  Synthetic polynucleotide
ggggcccgggggcccgggaggcgaacccggcaagggcggcgcagcagcagcggcggcggccgcggcagcggcggcggcggcagcggcagcggcggcagctgcagcggcggcagctggaggcctggctgcggctgggggccctggacaaggctgggctcccggccccggccccatcacctccatcccggattcgcttgggggtcccttcgccagcgt

SEQ ID NO: 9911 - DNA, 220 bp, Artificial Sequence
  Synthetic polynucleotide
cctggccccggcctggggctctgtgtgtttcagcactctacccagaccctcccggccccagggtccacacgtgctcggccgcaggaggcttcagcaccagcaggaggcttcagcaccagcgattacgacgttggctgggagagtcctcacaatggctcggggacgtgggcctattcagcgccggatctgctggggtgagcagagcgagggccccgggcgt

SEQ ID NO: 9912 - DNA, 220 bp, Artificial Sequence; identical to SEQ ID NO: 9866
  Synthetic polynucleotide

SEQ ID NO: 9913 - DNA, 209 bp, Artificial Sequence; identical to SEQ ID NO: 9865
  Synthetic polynucleotide

SEQ ID NO: 9914 - DNA, 216 bp, Artificial Sequence; identical to SEQ ID NO: 9858
  Synthetic polynucleotide

SEQ ID NO: 9915 - DNA, 220 bp, Artificial Sequence
  Synthetic polynucleotide
ccaccttgcctgccccctggatcccaggtttgggagaggggcaggagtgacaggcctcacccccacaggcctggctgtgatgcactcacagggcagcgatgcactcacagggcagcgattacctggacatcggcaacaacccgagagtgggcaccaagcggtacatggcacccgaggtgctggacgagcagatccgcacggactgctttgagtcctacaa

SEQ ID NO: 9916 - DNA, 217 bp, Artificial Sequence
  Synthetic polynucleotide
cctggccaacctgctcctagccttcctgcggcgccagccacagccctggtgcctggtggcacacaatggtgaccgctacgacttccccctgctccaagcaccccctgctccaagcagagctggctatgctgggcctcaccagtgctctggatggtgccttctgtgtggatagcatcactgcgctgaaggccctggagcgagcaagcagcccctcaga

SEQ ID NO: 9917 - DNA, 211 bp, Artificial Sequence
  Synthetic polynucleotide
gtgcctgcttcgcttggcggccttcgcgcacgacgccagcccggccgcccgcgcccagctcttctccgcgctgcacggctatctgcgccccaaaccgccccaaaccgccccggcccaagccggtagatccgaggcctccagcgccgcgcccatccctggaccccgccgcaccggcccttggccctgcgctgcaccagcgccccccagtgca

SEQ ID NO: 9918 - DNA, 215 bp, Artificial Sequence
  Synthetic polynucleotide
aatataactagtaaaagaagttttgtttatttttaaacagaattagttttaacaacattggacttccaaaaggctctccgcggatttcttcctgcgtctttcttcctgcgtctttgcgaagtgtcaacctgcataaacctagagacctgggttgggacaagattggtgggttacatgaagttaggcagatactcatggatactatccagttacct

SEQ ID NO: 9919 - DNA, 217 bp, Artificial Sequence
  Synthetic polynucleotide
taggttacctacatctcatacttgctttaatgtgcttttacttccggaatactcaagcaaagaaaaacttaaagagagattgttgaaggccatcacgtatgaaggccatcacgtatgccaaaggatttggcatgctgtaaaacaaaacaaaacaaaataaaacaaaaaaaaggaaggaaaaaaaaagaaaaaatttaaaaaattttaaaaatataac

SEQ ID NO: 9920 - DNA, 220 bp, Artificial Sequence
  Synthetic polynucleotide
acagctccagacactcaggcattgggcacggacaagcttcatctgcagtcagagacagtggacaccgagggtacagtggtagtcaggccagtgacaatgagtcaggccagtgacaatgagggacattcagaagactcagacacacagtcagtgtcagcccacggacaggctgggtcccatcagcagagccaccaagagtccgcacgtggccggtcagggg

SEQ ID NO: 9921 - DNA, 217 bp, Artificial Sequence
  Synthetic polynucleotide
gcctctaactccagcccccttcagcatctccggctacgacatccctgagggcacagtcatcattccgaacctccaaggcgcccacctggatgagacggtccctggatgagacggtctgggagaggccacatgagttctggcctggtatgtggggggccgggggcctgccgtgaaaatgtggtggaggctggtccccgctgccgctgaacgcctcccc

SEQ ID NO: 9922 - DNA, 219 bp, Artificial Sequence
  Synthetic polynucleotide
gtgggaggggaggcgggaaacagcttagtgggtgtggggtcgcgcattttcttcaaccaggaggtgaggaggtttcgacatggcggtgcagccgaaggaggcggtgcagccgaaggagacgctgcagttggagagcgcggccgaggtcggcttcgtgcgcttctttcagggcatgccggagaagccgaccaccacagtgcgccttttcgaccggggcga

SEQ ID NO: 9923 - DNA, 207 bp, Artificial Sequence
  Synthetic polynucleotide
gcaatgtcttcttttttgaaaggatataattgacactggcaaaacaatgcagactttgctttccttggtcaggcagtataatccaaagatggtcaaggtcaaggtcgcaaggtatgtatgacattttgacacagaatattttcctcatttgaagggggattaagtgattgcttctttttaaggataaatgttttcaactgtcatttt

SEQ ID NO: 9924 - DNA, 220 bp, Artificial Sequence
  Synthetic polynucleotide
agctgaccaacctgaaggtgtgcattgaattaacagggctccatcctaaaaaacaacgccacttgctgcaccttagagaacgatgggagcagcaggtgtcgatgggagcagcaggtgtcggcagcagatggcaaacctggccggcaaagcaggaaggaagtgacccaggccactcagcctgaggccattcctcaggggactaacatcactgaagagaaac

SEQ ID NO: 9925 - DNA, 221 bp, Artificial Sequence
  Synthetic polynucleotide
gccttgtcagtgcttgattacatactctgtctccttccgttaattttagaatgagagcgctcgctgtgctgtctgtcacgctggttatggcctgcacagactggttatggcctgcacagaagccttcttccccttcatctcgagagggaaagaactcctttggggtaagtagcaaacacattgcggtcttctggccttataaagttatttttcacacttac

SEQ ID NO: 9926 - DNA, 217 bp, Artificial Sequence
  Synthetic polynucleotide
accccacccccagctgcggggcgaatggaggcggcggcggcgggcccagcccggctggagctccgggggcggcggggcccgggggcccgggaggcgaaccccccgggaggcgaacccggcaagggcggcgcagcagcagcggcggcggccgcggcagcggcggcggcggcagcggcagcggcggcagctggaggcctggctgcggctgggggccctg

SEQ ID NO: 9927 - DNA, 215 bp, Artificial Sequence
  Synthetic polynucleotide
agctattctctgtcctcccaccagcttcatgtactggactgactggggaactcccgccaagatcaagaaagggggcctgaatggtgtggacatctactcgctggtgagctggtgactgaaaacattcagtggcccaatggcatcaccctaggtatgttcgcaggacagccgtcccagccagggccgggcacaggctggaggacagacgggggttg

SEQ ID NO: 9928 - DNA, 214 bp, Artificial Sequence
  Synthetic polynucleotide
tctcgtaccgcgcgcgctgcgagccgcctgccgtcgggaccgcgtgcacgcgcctctgccgtccgcgcagcgccccctcgcggtgcggtccgggactgcggtccgggactgcgcccctgcgcaccgctcgaggacgaatgtgaggcgccgcgtgagtcctgcgttcgaccccaccccgtcccagccggggaccccggcccctcctgagcgtcac

SEQ ID NO: 9929 - DNA, 215 bp, Artificial Sequence
  Synthetic polynucleotide
aggaggacattgaaagcaacctgctccggcccacaggcgtagccctgcgaggagcccacttctgcctgaaggtcttccgggccgaggacttgccgcagaggacttgccgcagagtgcgtggggcgcgcccttgggtgggaggtctgcaggaggctggaggcgcagggctggtgggggtgggcgatggcgggcggggtcagctccctgggggaagg

SEQ ID NO: 9930 - DNA, 212 bp, Artificial Sequence
  Synthetic polynucleotide
aatgatgtttttcaggccttcaactcaaaccatatcataaacccttgcaacatgttcgtgactggccagaaatacttgctgaattgactaatctggatcctatctggatcctcaaagggaaacacctcagctttttctaagaagagatgtgagacttcccttggaagttgaaaaacaggtttgcttggaaatcttatttacagttatttaaa

SEQ ID NO: 9931 - DNA, 229 bp, Artificial Sequence; identical to SEQ ID NO: 9868
  Synthetic polynucleotide

SEQ ID NO: 9932 - DNA, 217 bp, Artificial Sequence
  Synthetic polynucleotide
gaggcagagcatacgcagcctgtacccagtggtgccgagcctctggcggtgccaagcctcacaccacccccacccacagatccactgtgcgacgagctgtgccgcacgtgccgcacggtgatcgcagccgctgtcctcttctccttcatcgtctcggtgctgctgtctgccttctgcatccactgctaccacaagtttgcccacaagccacccatct

SEQ ID NO: 9933 - DNA, 215 bp, Artificial Sequence
  Synthetic polynucleotide
cttactacggagcacatttgcagtgaattgaggaatttgaatattttgaagaatgtttccgctgaatattcaatctacatcgcttgcgagccttccccttcgagccttccccttcagcgaacaatgaaatacatgtggccattgtaagtataagacccattcacacctcattattcgatggcaaggcagttcggttaaccagtgtctgaatggag

SEQ ID NO: 9934 - DNA, 214 bp, Artificial Sequence
  Synthetic polynucleotide
gggctcttctggccccagggtctctcaccctgtctctctcctgtccctcccctccagctggatgctgatgatgccaaggcaacctttgatgaggaggaaggatgaggaggaaggtcgggatgaatacgacgaagtggccatgcctgtgtgaggggcgggcccaggccctagaccctcccccaccattccacatccccaccttccaaggaaaagc

SEQ ID NO: 9935 - DNA, 227 bp, Artificial Sequence
  Synthetic polynucleotide
gtaggtttctgctgtgcctgactggcatttggttgtacttttttttctttatctcttcactgctagaacaactatcaatttgcaattcagtacaattaggtgggcttagatttgtgggcttagatttctactgactactagttcaagcgcatgaatatgcctggtagaagacttcctcctcagcctattctttttaggtgcttttgaattgtggatatttaattcga

SEQ ID NO: 9936 - DNA, 215 bp, Artificial Sequence; identical to SEQ ID NO: 9933
  Synthetic polynucleotide

SEQ ID NO: 9937 - DNA, 219 bp, Artificial Sequence
  Synthetic polynucleotide
ccgccgcgggaggagcccggactcgggccgaggctgcccaggcaatgcgttcactcggcgcaaacatggctgcggccctgcgcgccgcgggcgtcctgctcgccgcgggcgtcctgctccgcgatccgcgtaagtgggtctgtcgcggcggccgccagggccaggatccctgagaaggcgtgggcagagcgggcagctggcgcccgggccctcgcgccc

SEQ ID NO: 9938 - DNA, 213 bp, Artificial Sequence; identical to SEQ ID NO: 9896
  Synthetic polynucleotide

SEQ ID NO: 9939 - DNA, 215 bp, Artificial Sequence
  Synthetic polynucleotide
cgcggctcgggcacactggacgtacctgtgggggaaggagctggatgtgcaggccccgcccaccccgccgcaggccacctacggccccgcggtcacgctacctggcgacctggcgcggctcgcggcgtctgggtttgtgttgtcgatggcgacccgtttcccttgcttcagggctgtctcacacgtggtcacacagcgctgccaggagcctagcg

SEQ ID NO: 9940 - DNA, 218 bp, Artificial Sequence; identical to SEQ ID NO: 9859
  Synthetic polynucleotide

SEQ ID NO: 9941 - DNA, 223 bp, Artificial Sequence
  Synthetic polynucleotide
ttgcgttctctccttgtgccctgccgtgagccaggcctttcttaattaccttgggggagtcactggtcactgttacccggaagaggtacatggacactgtcatgccagccatcatgccagccatcatgaacagcaacaggccatggcgagggttcccgtagttggacagtcccgcctatggatacagtcccggcaatgtcacgtcctcagaacagggcagaga

SEQ ID NO: 9942 - DNA, 217 bp, Artificial Sequence
  Synthetic polynucleotide
gctacctggagatcagcctgcggctgcaccgcttgctgcgcgacagcgaggccttctgccaccgcaactgcagcgccgcgccgcagcccgagcccgccgcagcccgagcccgccgccggcctcgccagctatcccgagctgcgcctcttcgggggcctgctgcgccgcgcgcactgcctcaagcgctgcaagcagggcctgccagccttccgccagt

SEQ ID NO: 9943 - DNA, 215 bp, Artificial Sequence
  Synthetic polynucleotide
tatagtctttctctcctctagcaaccttggaattcagagtcctactcacctgcgtagtgataaatattggttgtgaggccacaggggaactagtcacatgattggcagattggcattctgcatgacctgaacaggcctcaatactggttgagtaaccattgtgcccagacctggggctggattctgggtcaggatgagtggctgtccaccttgct

SEQ ID NO: 9944 - DNA, 218 bp, Artificial Sequence
  Synthetic polynucleotide
tggggctctaggcagtttgtctggggtgggacttggcatccctgcgccctgtgactctctgcccctgcgccccagggagcgcgggggcttctttagcccgggggcttctttagcccggaacccggtgagcccgacagcccctggacgggctcaggtggcaccacgccctccacccccacaacccccaccacggagggtgagggcgacggactctccta

SEQ ID NO: 9945 - DNA, 211 bp, Artificial Sequence; identical to SEQ ID NO: 9906
  Synthetic polynucleotide

SEQ ID NO: 9946 - DNA, 208 bp, Artificial Sequence
  Synthetic polynucleotide
gtggcctaccggagacatgagaagaagaggaagttcatcaagggggagataaagagtgaatttaaggacatcgaggagatcaaaacccagaaggtccgcattccgcatcgaaggctccctgtggtggacctacacaagcagcatcttcttccgggtcatcttcgaagccgccttcatgtacgtcttctatgtcatgtacgacggcttc

SEQ ID NO: 9947 - DNA, 209 bp, Artificial Sequence
  Synthetic polynucleotide
atggatgaaggctcagaagcatcctcctgctcatctgctttggcctcgaagcccagcccagagggagcctctgctgccagctttgagtacactatcctggaatcctggaccccagctcccagctcttgcgtccatggacactgtgccctgagctgccccctaccccaccccacctaaagtacctgtaccttgtggtatctgactctggc

SEQ ID NO: 9948 - DNA, 218 bp, Artificial Sequence
  Synthetic polynucleotide
gaccactgccccctccaccccctggagctggtgggccacccatgccaccaccaccgccaccaccgccaccgccgcccagctccgggaatggaccagccccgggaatggaccagcccctcccccactccctcctgctctggtgcctgccgggggcctggcccctggtgggggtcggggagcgcttttggatcaaatccggcagggaattcagctgaaca

SEQ ID NO: 9949 - DNA, 211 bp, Artificial Sequence
  Synthetic polynucleotide
gtgtgagatggtgcagcccagtggtggcccggcagcagatcaggacgtactgggcgaagagtctcctctggggaagccagccatgctgcacctgccttcacctgccttcagaacagggcgctcctgagaccctccagcgctgcctggaggagaatcaagagctccgaggtgaggaaagagtcaggggatccagccctgctgaggggaaggc

SEQ ID NO: 9950 - DNA, 209 bp, Artificial Sequence
  Synthetic polynucleotide
tcagagcgtctggtgagatgctgttgccgctgctgctgctgctacccatgtgctgggccgtggaggtcaagaggccccggggcgtctccctcaccagtgaaccagtgagtcctcctgttcaccctcccgccaggctggaggtgggaggggccaacattgggccttagggataggcatttacagccttttgactcagtttcccggtagtg

SEQ ID NO: 9951 - DNA, 212 bp, Artificial Sequence
  Synthetic polynucleotide
ctgtgtgagatggtgcagcccagtggtggcccggcagcagatcaggacgtactgggcgaagagtctcctctggggaagccagccatgctgcacctgccttgcacctgccttcagaacagggcgctcctgagaccctccagcgctgcctggaggagaatcaagagctccgaggtgaggaaagagtcaggggatccagccctgctgaggggaag

SEQ ID NO: 9952 - DNA, 218 bp, Artificial Sequence; identical to SEQ ID NO: 9885
  Synthetic polynucleotide

SEQ ID NO: 9953 - DNA, 211 bp, Artificial Sequence
  Synthetic polynucleotide
ttatacgtagtaggtgctcagtagatgttgcatgcatccatgattagtcccttggtcacaaactgttgtgctttttcctagtactccacccacctgcacccacctgcaccttgctgaggactgtatgaagcattaccaaggcaccgtagacaaactctgccgagtggagcaggtaggactctccttctgccacggcaagtttttgccaggc

SEQ ID NO: 9954 - DNA, 208 bp, Artificial Sequence
  Synthetic polynucleotide
ttctagtacctaaggaaattcagaaaagagcaatgcatcaaccaataaccattttttcttatttcattacagagaagaggtgaagagtccagtgaaatggaaaatggagcaaatttcaatcattgaaaggttcccttatcccttccaggtgagttattttctctcaccaaatctcgaaaggcccctgtaacacaattagaaggggtgg

SEQ ID NO: 9955 - DNA, 219 bp, Artificial Sequence
  Synthetic polynucleotide
gcgtcatccctaccaacgttcccgagctcaccttccagcccagccccgcccccgacccgcctggcggcctcacctactttcccgtggccgacctgtctatcgtggccgacctgtctatcatcgccgccctctatgcccgcttcaccgcccagatccgaggcgccgtcgacctgtccctctatcctcgagaagggggtgtctccagccgtgagctggtga

SEQ ID NO: 9956 - DNA, 219 bp, Artificial Sequence
  Synthetic polynucleotide
ctgggaacataggttttgattgtcacctcaatgggactgcttcacagaagaaaagcctggttcataaaactttgcctgatgttctagcagaacctttatcactagcagaacctttatcaagtgaaagacatgagtttgtgatggcacaatatgtgaatgaatttcaggtaaattgttggtaacatttattgtgctttcctgattattaatgctatatga

SEQ ID NO: 9957 - DNA, 205 bp, Artificial Sequence
  Synthetic polynucleotide
aaaaagacctcatttataataaggtcactccaacatttcaccactggaagattgatgacaagaagtttggtcttacgtttcaaagtcctgctgatgctagctagggcttttgatagaggtatccgaagagctatagaggatatttctcaaggtaggtattcttgactattttcttaatttatttatcggttatatatagtagagg

SEQ ID NO: 9958 - DNA, 211 bp, Artificial Sequence
  Synthetic polynucleotide
gcctggtccaataccaggtggggctcttcctgtccactcccagcctcccactgtcccaccgcctcctgcctctctcctctctccccagaacatccagagtcatccagagtctgtcccctgtgaagaagaagaagatggtgcctggggctctgggggtccccgctgacctggcccctgttgacgtcgagttctcctttcccaagttctcccg

SEQ ID NO: 9959 - DNA, 209 bp, Artificial Sequence
  Synthetic polynucleotide
ctgaccatccagaagggcagtgggcggcaggaggatgagcgggaagtggcagagtttatggagcagcttggcacagccttgcgacctgacaaggtaccgcggtaccgcgagacatgcgtcgctgctgtttctgtcatgaggagggtgacggggccactgatgggcctgcccgtctgctgaacctggacctggacctgtgggtgcacctc

SEQ ID NO: 9960 - DNA, 212 bp, Artificial Sequence
  Synthetic polynucleotide
tacagttgatatagaagatcatgagtgtgctgtgtggctgctcctacggaagagcaagtcagatgacaaaaccacgcgactcgaggctgtgcgggaaatgtgcgggaaatgtcggagacccatcactggcatggtaatgagactacctgaacaggtggcatgccttcagctggctcttgattgctgacataaaagacaagggagtggccagg

SEQ ID NO: 9961 - DNA, 215 bp, Artificial Sequence
  Synthetic polynucleotide
gagtttgctgaagaggaagatgttacccagggcagccttgctggtcaccacgcggcccagggcactgagggacctccagctcctggcgcagcagccgatctgcagcagccgatctacgtaagggtggagggcttcctggaggaggacaggagggcctatttcctgagacactttggagacgaggaccaagccatgcgtgcctttgagctaatgag

SEQ ID NO: 9962 - DNA, 221 bp, Artificial Sequence
  Synthetic polynucleotide
ccgaccttggcccgcggccgccggtgagcctagacccgcgcgtctccatctacagcacgcgccgcccggtgttggcgcgcacccacgtccagggccgcgtacccacgtccagggccgcgtctacaacttcctcgagcgtcccaccggctggaaatgcttcgtttaccacttcgccgtgtgagtatcgccaccggcgacggccggcacgaaggtgcttcctg

SEQ ID NO: 9963 - DNA, 208 bp, Artificial Sequence
  Synthetic polynucleotide
gctggccctggtggccctgggtgtcctgggcctgtggcatgtccgacggaggcaggagaagcagcgtggcctgcacagcgagctgggagagtccagtctccagtctcatcctgaaagcatctgagcagggcgacagcatgttgggggtatgggcctggggacctgggacacagggtgtaggaggggcagataggaactgcagaatcag

SEQ ID NO: 9964 - DNA, 207 bp, Artificial Sequence
  Synthetic polynucleotide
ccccccgcagaaacgtctacaaggacctgcggcagatcgagctggcctgtgactcccaggaagacgtggacagctggaaggcctcgttcctccgagctggagctggcgtctaccccgagaaggaccaggtgaggagccgtcctgcgcagccaggcccagagcccccacctgggagaggaagcagggctggctttccccaggacaggt

SEQ ID NO: 9965 - DNA, 211 bp, Artificial Sequence
  Synthetic polynucleotide
acacacttctctctgtgcctttagaagtcggggacttcctctccctggacctgggtggcactaacttcagggtgatgctggtgaaggtgggagaaggtgagagaaggtgaggaggggcagtggagcgtgaagaccaaacaccagatgtactccatccccgaggacgccatgaccggcactgctgagatggtgagcagcgcaggggccgggg

SEQ ID NO: 9966 - DNA, 217 bp, Artificial Sequence
  Synthetic polynucleotide
acggccgatcctgagccacctttggaagagctgggctaccacatctactccagcgacccaccttttgaagttcgtggtgccaatcagtggatcaagtttacagtggatcaagtttaagtcagtcagttaaggggaggagaaggagaggttataccttcagggggctaccagacagtgttctcaacttggttaaggaggaagaaaacccagtcaatga

SEQ ID NO: 9967 - DNA, 214 bp, Artificial Sequence
  Synthetic polynucleotide
cagtgccagtcctttccaaagaatgtgcatcaggggagagaggccgccgcatgagtcaaatgaagaccccgcacaatcccttggactccagcgccccactccagcgccccactgatgaagaaagggaagcagagggagatccccaaggccaagaagccaacctcactgaagaaggtatgtggggtgtttcagccgaagtgaggcactagaaaac

SEQ ID NO: 9968 - DNA, 212 bp, Artificial Sequence
  Synthetic polynucleotide
atattaaagtcgtaattttgtttctaaactcatttggcccacaggtggaaatggtgtattcattgttgtcaatgcttggtactcatgataaggatgatataaggatgatatgtcgcgaactttgctagctatgtctagctcccaagacagctgtatatccatgcgacagtctggatgtcttcctctcctcatccagcttttacatggcaatg

SEQ ID NO: 9969 - DNA, 214 bp, Artificial Sequence
  Synthetic polynucleotide
gccctccagtgggtccgctctccctggggctggcgacagtggacatccagaaccctgacatcacgagttcacgataccgtgggctcccagcacctggacccagcacctggacctagcccagctgataagaaacgctcagggaagaagaagatcagcaaagctgatattggtgcacccagtggattcaagtgagagccactccccagtggaccca

SEQ ID NO: 9970 - DNA, 220 bp, Artificial Sequence; identical to SEQ ID NO: 9866
  Synthetic polynucleotide

SEQ ID NO: 9971 - DNA, 216 bp, Artificial Sequence
  Synthetic polynucleotide
gctcacattccgtctctctggggaacacttttagagcctacatggaggacgcgcccctgctgagaggagccgtgttttttgtgggcatggctctctggggcatggctctctggggagcccaccggctctattctctcaggaactcgccgacatctgtgttgccatcattttaccaggtaaggcggtttctgtgtgcagtgagctggcaggaacggg

SEQ ID NO: 9972 - DNA, 217 bp, Artificial Sequence; identical to SEQ ID NO: 9886
  Synthetic polynucleotide

SEQ ID NO: 9973 - DNA, 212 bp, Artificial Sequence
  Synthetic polynucleotide
ggctggagcaacggcagctacagcatgatgcaggaccagctgggctacccgcagcacccgggcctcaatgcgcacggcgcagcgcagatgcagcccatgcgcagcccatgcaccgctacgacgtgagcgccctgcagtacaactccatgaccagctcgcagacctacatgaacggctcgcccacctacagcatgtcctactcgcagcagggc

SEQ ID NO: 9974 - DNA, 210 bp, Artificial Sequence
  Synthetic polynucleotide
cgtcactgtgaaggtcagcatgtgcccagatttttgctttgagaatataaaaaaaacttttattttctgttccagaactttccatgactggatcacagggatcacagggaaaaaccgaccgagctcaggaagcctaatccaggtggtaaccacagaaggaaggacggaactcaccccagcatatttttaggcctcatctcagtgcctatg

SEQ ID NO: 9975 - DNA, 219 bp, Artificial Sequence
  Synthetic polynucleotide
cttttattacagaattcagccttttctacattcattctgtctttagtgagtaataaactgctgttctcatgctgtaatgagctggcatgagtatttgtgccacatggctccacatggctccacatgcaagtttgaaacagaactaccctgatacttttctggatgcctctcagctgcacgcttctcagtggtgttcaaatcattattactgggttgatg

SEQ ID NO: 9976 - DNA, 211 bp, Artificial Sequence; identical to SEQ ID NO: 9953
  Synthetic polynucleotide

SEQ ID NO: 9977 - DNA, 208 bp, Artificial Sequence
  Synthetic polynucleotide
ttggctggtctcacaattgtactttactttgtattatgtaaaaggaatacacaacgctgaagaaccctgatactaagggatatttgttcttacaggcaacaggcaacaatgcaggatttggaacagaggcgtccccagttggaagaactcattaccgctgcccaaaatttgaaaaacaagaccagcaatcaagaggctagaacaatca

SEQ ID NO: 9978 - DNA, 216 bp, Artificial Sequence
  Synthetic polynucleotide
gcagagcgggcttgccttctccctcaggtggccaaagtggagaagttcaaacacactcagagcaccaaggacagcctgcacgccaagtacaacaccgccacgtacaacaccgccacctgtggcacggtggtgggcgacgaccagtggggccacctccaggtggatgccacctctctcttcctcctgttcctggcccagatgaccgcctcaggtgag

SEQ ID NO: 9979 - DNA, 205 bp, Artificial Sequence
  Synthetic polynucleotide
tggggaactcccgccaagatcaagaaagggggcctgaatggtgtggacatctactcgctggtgactgaaaacattcagtggcccaatggcatcaccctagctaggtatgttcgcaggacagccgtcccagccagggccgggcacaggctggaggacagacgggggttgccaggtggctctgggacaagcccaagctgctccctga

SEQ ID NO: 9980 - DNA, 220 bp, Artificial Sequence
  Synthetic polynucleotide
cccgccctctctcccgcagttctcagggctgcgcagggacctgccgccctcggtgcacctgctcacgctggccagctggggccccgaaatggtgctgctgccccgaaatggtgctgctgcgcttggagcaccagtttgccgtaggagaggattccggacgtaacctgagcgcccccgttaccttgaacttgagggtgagaagggcaaaattgagaaggag

SEQ ID NO: 9981 - DNA, 212 bp, Artificial Sequence
  Synthetic polynucleotide
caaaccctacaacagcagcggcctgggcggcccctccatcaaggacaagtatgtgacggcgctctacttcaccttcagcagcctcaccagtgtgggcttcgtgtgggcttcggcaacgtctctcccaacaccaactcagagaagatcttctccatctgcgtcatgctcattggctgtgagtgtgcccaggggcgggcggcggggagagccca

SEQ ID NO: 9982 - DNA, 219 bp, Artificial Sequence
  Synthetic polynucleotide
gcactggggggcgctggtgcagcgcagggccaagggccggtgcggcggggtccagggatgggcgcggcgctggaggcctcggatctaccggcttgggccggggcggtttggggcggtttggggcgcagatagccgtgcagcgcggagaagagctgggcgcgggcggccgggctggcgtcgtgcgcgaaggccgccaagcgaagcaggcactcgcggaaa

SEQ ID NO: 9983 - DNA, 216 bp, Artificial Sequence
  Synthetic polynucleotide
agggggttgcctgtacctcggggagcccaagccccttttgagggcactgacgctcacgccccccgggtcttccaacacctgcagccaacatggcagcagccaacatggcagcagccttcggaggcttcctctacttcttcacctacatcccctacttcttcgtggcccctcggtacaactggatgactctgagccagaagctctgctcctgcctcc

SEQ ID NO: 9984 - DNA, 208 bp, Artificial Sequence
  Synthetic polynucleotide
ccgcccctggccggcaccagcggtcagcccgcagcctcgaggcaagcagccctgcccctggcactatccgcccgcggggacggccactcaccgatgacggcattggcgcattggcgatggtgatcttgagccacatgcggtcgcggatctccagtcccgagtctggcagctgcatgacccggacgacggcgctcatgtcactcttcac

SEQ ID NO: 9985 - DNA, 215 bp, Artificial Sequence
  Synthetic polynucleotide
gcgcaagggcaactactggacgctggacccggcctgcgaagacatgttcgagaagggcaactaccggcgccgccgccgcatgaagaggcccttccggccgcgcccttccggccgccgcccgcgcacttccagcccggcaaggggctcttcggggccggaggcgccgcaggcgggtgcggcgtggcgggcgccggggccgacggctacggctacct

SEQ ID NO: 9986 - DNA, 225 bp, Artificial Sequence; identical to SEQ ID NO: 9898
  Synthetic polynucleotide

SEQ ID NO: 9987 - DNA, 205 bp, Artificial Sequence
  Synthetic polynucleotide
cagctgaccgttaaaagacaaggactctattatatctatgcccaagtcaccttctgttccaatcgggaagcttcgagtcaagctccatttatagccagccagcctctgcctaaagtcccccggtagattcgagagaatcttactcagagctgcaaatacccacagttccgccaaaccttgcgggcaacaatccattcacttggga

SEQ ID NO: 9988 - DNA, 217 bp, Artificial Sequence
  Synthetic polynucleotide
cagagcaaagtacagagtcaagagttccaaagccacagaccccagacccccccaggccaaagagaagctgcacttacggaggcaccagcaggcccaggggacccaggagacccaggagtaccaggttcaccgcgaggaccttgagcaccttcaggaccacgggcaccagtggggccggcttcaccctgggaagagacagggaggatgaaatgaagaa

SEQ ID NO: 9989 - DNA, 209 bp, Artificial Sequence
  Synthetic polynucleotide
gcgatgcgaagaaccctgctgctgtgctgcccctgatgctgccaggaatggcgggcctgcccaacgtgtttggcttgggcgggctgttgaataaccctctaaccctctgtcagctgctactggaaacaccactactgcttctagtcaaggagaaccggaagacagcacttcaaaaggagaggagaaaggaaatgagaatgaagacgaga

SEQ ID NO: 9990 - DNA, 221 bp, Artificial Sequence
  Synthetic polynucleotide
gaagaagagggctctgggcagcctgtggctggagaagttacctcggatcctttagccagagcaaatccgccccctagtagcagcacgatgccccagggcactttctcctgactttctcctgggttaccttccaatccagcaggggagggggataaaatggagttttcctttctgggaagaaaaagaaacacacacacacacacacacacacacacacacac

SEQ ID NO: 9991 - DNA, 208 bp, Artificial Sequence
  Synthetic polynucleotide
ggccagtctccggacctggcgcaccacgccgccagccccgcggcgctgcagggccaggtatccagcctgtcccacctgaactcctcgggctcggactacggactacggcaccatgtcctgctccaccttgctatacggtcggacctggtgagaggacgccgggccggccctagcccagcgctctgcctcaccgcttccctcctgcccg

SEQ ID NO: 9992 - DNA, 220 bp, Artificial Sequence
  Synthetic polynucleotide
tgcctgccaggggggaggctcctaaggcccaccccggtgttttccccgccagctgccttctgccagagcctgggcgccgccgcccccgaggtccgctgctgcccccgaggtccgctgctgtgtggatgccgtgaacttcgtggccgagagcacgagagatcaggaggccaccggcgaggtgggacaggagccagaggcgggtggagcgaggcagaggccc

SEQ ID NO: 9993 - DNA, 217 bp, Artificial Sequence
  Synthetic polynucleotide
ctcgtgctcaggctgctccaggcatgtgggaagctgaagcggcagctctgcgccatctaccggctgaactttctgaccacagcccccagcaggggaggcccccagcaggggaggcccacacctgccccagcacctgcaggaccaagtgcagaggctcatgcggtaagtgcagtgcggccccctgggtggccagggcagggtctggggcccgtacttc

SEQ ID NO: 9994 - DNA, 214 bp, Artificial Sequence
  Synthetic polynucleotide
ctggcaccggaggtggcggcggcggcggcggggcgagcggcgggactagcggcagctgcagccccgcgtcctcggagccgccggctgcgcccgccgaccgcgcccgccgaccgcctgcgcgccgagagcccgtcgccgccgcgcctgctggccgcgcactgcgcgctgctgcccaagccgggcttcctgggcgcgggcggcggcggcggcggca

SEQ ID NO: 9995 - DNA, 205 bp, Artificial Sequence
  Synthetic polynucleotide
ccatgcagcctggaatttgaggctacccagtgccccaacccattctcctacgtgcccaggcctctctcctctcattcagatcacatgaccttcctgcagccagcgggtgaagaacatgctcattgccttttcacagaactttctgtgcgacgtggtttattccccgtatgcaacccttgcctcagaattccttcagagagaggtg

SEQ ID NO: 9996 - DNA, 207 bp, Artificial Sequence
  Synthetic polynucleotide
ccagtggctattcatccctggcaaccctggagggcagcatggatggagaggagcaggccccccagctctacgtcctgtatgagaaaggccggaaccactaccactacacagagagcatctccgtggccaaaatcagtgtctatgggacactctgagctgtgccactgccacaggggtattctgccttcaggactctgccttcaggaa

SEQ ID NO: 9997 - DNA, 221 bp, Artificial Sequence
  Synthetic polynucleotide
cagccgccgccagccgcagccatgggccgggcccggccgggccaacgcgggccgcccagccccggccccgccgcgcagcctcccgcgccaccgcgccgcctcccgcgccaccgcgccgccgcgcccgttccctggcgctgctcggagccctgctggccgccgccgctgccgccgccgtccgggtctgcgcccgccacgccgaggcccaggcggccgcgcgg

SEQ ID NO: 9998 - DNA, 213 bp, Artificial Sequence
  Synthetic polynucleotide
ccaccctgagcaatggcggctgccagtatctgtgcctccctgccccgcagatcaacccccactcgcccaagtttacctgcgcctgcccggacggcatgctgctggctgctggccagggacatgaggagctgcctcacaggtgtggcacacgccttgtttctgcgtcctgtgtcctccaactgccccctcctgagcctctctctgctcatctgt

SEQ ID NO: 9999 - DNA, 217 bp, Artificial Sequence
  Synthetic polynucleotide
catcccccgggctcaggaggctgctctgctcccccaggtcttcacctcagacactgaggcctccagtgagtccgggcttcacacgccggcatctcaggccgccggcatctcaggccaccaccctccacgtccccagccaggaccctgccagcatccagcacctgcagccggcccaccggctcagcgccagccccacaggtgagaggccctggctcca

SEQ ID NO: 10000 - DNA, 227 bp, Artificial Sequence
  Synthetic polynucleotide
ttccctccccatagttaccgtacacgagaagaaattcaggaagtaagaagtaagagtgaccctattatgcttctcaaggacaggatggtgaacagcaatcttgccagtgtggacttgccagtgtggaagaactaaaggtacagtcacttgttcatggtggtttgaaggttggctttaaaagttgccacccctgggtggccacagagtttgtgtgggttcctccaagc

SEQ ID NO: 10001 - DNA, 215 bp, Artificial Sequence
  Synthetic polynucleotide
tttgttatatataaatattagtttatatgttcataattattttcaacgtatattacagagtattaaagaatctgaagaggaactatattgtgcctattctattgtgcctattctttggcttaatgaggtttgtatttgcagctgttagtcattaaaaacaaccttctttgtatataaacaagctcttgatgtttcaaaagaatgtatagtattta

SEQ ID NO: 10002 - DNA, 208 bp, Artificial Sequence
  Synthetic polynucleotide
gagctggctctgctgcagcagcctgaggaccagcctgactctgccctcccagaaatcctgcagtttaacctgctgggggtgcctctggtcggggccgacggccgacgtctgcggcttcctgggcaacacctcagaggagctgtgtgtgcgctggacccagctgggggccttctaccccttcatgcggaaccacaacagcctgctcagt

SEQ ID NO: 10003 - DNA, 219 bp, Artificial Sequence
  Synthetic polynucleotide
tgggatacatactactgaatgcaaaggacaccacacacacgcatgtgcacacacacacacgctttttacctgagtggttaaaatgtcactctgagaggatagccctgagtagccctgagcagtcttcagagacgcttgtttcactctcacacccagatgctgcttcaccttaaataacaaaaacagaggttcagatgtaaaagcagactataaacgctg

SEQ ID NO: 10004 - DNA, 214 bp, Artificial Sequence
  Synthetic polynucleotide
tgccaatctcatcttgttttctgcgcaagttaggttttgtcaagaaagggtgtaacgcaactaagtcatagtccgcctagaagcatttgcggtggacgatggaggggccggactggaggggccggactcgtcatactcctgcttgctgatccacatctgctggaaggtggacagcgaggccaggatggagccgccgatccacacggagtacttg

SEQ ID NO: 10005 - DNA, 214 bp, Artificial Sequence; identical to SEQ ID NO: 9928
  Synthetic polynucleotide

SEQ ID NO: 10006 - DNA, 219 bp, Artificial Sequence
  Synthetic polynucleotide
agaaaaaaagaatgacaaggttcacttttgatgatacggggtgttattaataagacatgtttcctttttggtactagggtgctcctggtgctgtaggtgctcatggtgctgtaggtgcccctggtcctgctggagccacaggtgaccgggtaagcatgcattttcactaagccaacagcaatatctaaaatttcccgccttccctagtcccaaagagcc

SEQ ID NO: 10007 - DNA, 209 bp, Artificial Sequence
  Synthetic polynucleotide
cgaattcgtgctcaaggagggccagctgctgtgcaagggtgactacgagaaggagaaggacctgctcagctccgtgagccccgacgagtccgactccggtactccggtgaggcctggcctgagctgggggcaggcctcagggacgggggttgctggggtgtcctggaggggagtcccggctggagaagccacctcctgcttccaggacc

SEQ ID NO: 10008 - DNA, 218 bp, Artificial Sequence
  Synthetic polynucleotide
cggccagggtgcagtgtcaggacccccccggaagcctcctgggactgtcgctggcacagcccgaggccctgaaggtggcagcacggctcaggtgccagcacggctcaggtgccagcacccacagcatcaccaccgccggagggtccagtgctcactttccagagtgagaagatgaagggcatgaaggagctgctggtggccaccaagatcaactcgag

SEQ ID NO: 10009 - DNA, 207 bp, Artificial Sequence
  Synthetic polynucleotide
ctttaaaatcaattctagcgcctttcttgttcatttttatctcagagcaggagttgttgggggcacctttcgagttctcaaggtaagctgagcttgctcctttctttcttggagggatgaggatcacagagttttgcattaatcttataaagctcgagggctttaatagctgctgcattattatccatacgaagaaaagttggacag

SEQ ID NO: 10010 - DNA, 216 bp, Artificial Sequence
  Synthetic polynucleotide
ccacctccgtcctgaccactggccactccccttccacagaaccacgcctttcgcctgctgaagccggggggcgtcctcacctactgcaacctcacctcctgcaacctcacctcctggggggagctgatgaagtccaagtactcagacatcaccatcatgtttgaggtgcgcccacctgaagttccccatgggtctccaggaagtgaccttggatgg

SEQ ID NO: 10011 - DNA, 209 bp, Artificial Sequence
  Synthetic polynucleotide
gggcggggtgggggcccctgggctcccagggtgggagctggctccgaggctggctggctccgcaggtccgctgacgtcgccgcccagatggcctccaggcctccaggctgaccctgctgaccctcctgctgctgctgctggctggggtatgtggtcccttgtgggatgggggacgggggtggagacgggaggcgggatggtgcggggtg

SEQ ID NO: 10012 - DNA, 216 bp, Artificial Sequence; identical to SEQ ID NO: 9858
  Synthetic polynucleotide

SEQ ID NO: 10013 - DNA, 215 bp, Artificial Sequence
  Synthetic polynucleotide
aatacagcaagtgtgacctgcccctgaggaccctggagagcctgttgagtgggctgggcccagccggcccttttgatatggtgtactggacaggagacatccccgcatccccgcacatgatgtctggcaccagactcgtcaggaccaactgcgggccctgaccaccgtcacagcacttgtgaggaagttcctggggccagtgccagtgtaccctg

SEQ ID NO: 10014 - DNA, 216 bp, Artificial Sequence
  Synthetic polynucleotide
cgaaattgtgtcaacacataaaactagttccgtgtatgtcttctcaattgaatgttttcatcttagggccctgctggccctgctggtgctcccggtcctggtgctcccggtcctgctggttcccgaggtgctcctgtaagttttgtcattttttggttttattttgttttgttctttttttaactcattctacagtgtaggaaatattttattttc

SEQ ID NO: 10015 - DNA, 213 bp, Artificial Sequence
  Synthetic polynucleotide
tctccagccccagctgctcaccatcgctatctgagcagcgctcatggtgggggcagcgcctcacaacctccgtcatgtgctgtgactgcttgtagatggccatggcccatggcgcggacgcgggtgccgggcgggggtgtggaatcaacccacagctgcacagggcaggtcttggccagttggcaaaacatcttgttgagggcaggggagtac

SEQ ID NO: 10016 - DNA, 225 bp, Artificial Sequence
  Synthetic polynucleotide
gcggctcgggcacactggacgtacctgtgggggaaggagctggatgtgcaggccccgcccaccccgccgcaggccacctacggccccgcggtcacgctacctggcgcggctccctggcgcggctcgcggcgtctgggtttgtgttgtcgatggcgacccgtttcccttgcttcagggctgtctcacacgtggtcacacagcgctgccaggagcctagcgtgtcct

SEQ ID NO: 10017 - DNA, 218 bp, Artificial Sequence
  Synthetic polynucleotide
tattctcattgcagtggtcttccaaatatttatgtcaatttcaccccaagctgtacctttgagggagaaaacactgtcatgatgctccagacggctaggtgctccagacggctaggtgagagtcaaatcctcgattcctcccatctgttcataagaatgttctagtccttttcctaggttcttgttcccatggtttttcttcaccgtatatatatatt

SEQ ID NO: 10018 - DNA, 206 bp, Artificial Sequence
  Synthetic polynucleotide
agcaatccagagcggccatcaacaaatgggtgtccaataagaccgaaggccgaatcaccgatgtcattccctcggaagccatcaatgagctcactgttctgttctggtgctggttaacaccatttacttcaaggtactcagaatggccctggagagaccccagggacttcctcttgctcttcagcttaccccctttttttttaaat

SEQ ID NO: 10019 - DNA, 206 bp, Artificial Sequence
  Synthetic polynucleotide
caaaataatcgatcttgttagtaaacgtgatggaaacagctcgctgattgctgccgttgcagaagtaagagttcagaggcggcctctgaagaacagaacagaacaggtaggtgtcaagtgggactagtttgtgtgatgatagtagatgatctcattatactattcaataaagccatcaggtcgagggattatctggcagtgcccta

SEQ ID NO: 10020 - DNA, 206 bp, Artificial Sequence
  Synthetic polynucleotide
agaatgagactctgtctcaaaaacaaacaaaaatttcttttcctaggaactaacaaaacattgtgtctttcttttgaagattatgtgatagaaaagctgggctggagcaatgcgggttctttgacgacaacattagaaaggacacattctttttgacggtccatgatgctatactctatctacagaaccaagtgaaatctcaagag

SEQ ID NO: 10021 - DNA, 217 bp, Artificial Sequence; identical to SEQ ID NO: 9893
  Synthetic polynucleotide

SEQ ID NO: 10022 - DNA, 218 bp, Artificial Sequence
  Synthetic polynucleotide
gggagtctgggcttcaggctgggatggggtctgtggagctgaggcggccccctgcccaccaggtcatggtattcccgggcctgcgtctgagccgtgaagccgtctgagccgtgaagccttcctcaccacggccgaatttgggacccaggagctccggcggcccgcccagctgcggctgcaggtgtaccggctcctcagcacagcaggtgggactctgg

SEQ ID NO: 10023 - DNA, 217 bp, Artificial Sequence; identical to SEQ ID NO: 9884
  Synthetic polynucleotide

SEQ ID NO: 10024 - DNA, 218 bp, Artificial Sequence
  Synthetic polynucleotide
ttcttgtcaaaaagatgctgttggaagcctctacgaagccagaaatgagtactgttatcaacaataccagaggaataattttttatagtgtccctcatcatatagtgtccctcatcatggatcacgtttggctgaatactctgttaatattcgctatcttctcttcccctcgttggaagtcaaagaactcagcaagggtaatactttttgtcataaag

SEQ ID NO: 10025 - DNA, 220 bp, Artificial Sequence
  Synthetic polynucleotide
ctataaattcattaagggagcttgtcctaaaagctatggctttaatgcagcaaggcttgctaatctcccagaggaagttattcaaaagggacatagaaaatcaaaagggacatagaaaagcaagagaatttgagaagatgaatcagtcactacgattatttcggtaactaactaactataatggaattataactaactgaccttaagtttcaaagaaaca

SEQ ID NO: 10026 - DNA, 225 bp, Artificial Sequence
  Synthetic polynucleotide
tggtcaggtcgagggccaggcctcagagcggcccctgtgtccacgcaggtgtttggtcttgggaacaagacctacgagcacttcaatgccatgggcaagtacgtggacaagctacgtggacaagcggctggagcagctcggcgcccagcgcatctttgagctggggttgggcgacgacgatgggaagtgagtgcccaccctgccaccatgatcagcgcggcgggc

SEQ ID NO: 10027 - DNA, 215 bp, Artificial Sequence
  Synthetic polynucleotide
agctagggagcagggctgatgccagagctccgctaaaggctgctctctcaacaagaggaacgatttaagtcttggggcacgccctgccagctcaccttcctgcagccgcacctgctgcagccgcacctgccgcagccgtgggggccccagctctgggctggactggttcccgtggacgtagggcagcagcacgtgggccatccatggccagagct

SEQ ID NO: 10028 - DNA, 218 bp, Artificial Sequence; identical to SEQ ID NO: 9883
  Synthetic polynucleotide

SEQ ID NO: 10029 - DNA, 219 bp, Artificial Sequence; identical to SEQ ID NO: 9852
  Synthetic polynucleotide

SEQ ID NO: 10030 - DNA, 215 bp, Artificial Sequence
  Synthetic polynucleotide
catgaagcgcggcgcatgatcgagggcgtggtgtacgagatgcgcgtctacgcggtcaacgccatcggcatgtccaggcccagccctgcctcccagcccttgcctcccagcccttcatgcctatcggtgagcctgcctggcctggtcctgccccccgccccctccccagttaaaaacctccaataatagcaggtgctctgcaggcagccatgcta

SEQ ID NO: 10031 - DNA, 209 bp, Artificial Sequence
  Synthetic polynucleotide
agattctggaagtcttctctggagatcttctcagattgcatgcccaatcacattgccgttgccctggcagccacccgcgggtccaccctttggcacagcggcacagcggtactgcattcctaatgatgcaggagacacagctgataatagagtgtcacggttgaatcctgaagcccatcctctctcttttgtcaatgataatgatgttg

SEQ ID NO: 10032 - DNA, 205 bp, Artificial Sequence
  Synthetic polynucleotide
aagtggatacctttgggctgagcctctactttccctccaaaataactgcctccgctgtgacctttgatcaccagggaaatgtgattgttgcagatacatctatctggtccagctatcctttgcttaggaaaacctgaggagtttccagtaccgaagcccatggtcactcatggtctttcgcatcctgtggctcttaccttcacca

SEQ ID NO: 10033 - DNA, 212 bp, Artificial Sequence
  Synthetic polynucleotide
ttggcaggactttgaaatggatgtggtggcaatggtgaatgacacggtggccacgatgatctcctgctactacgaagaccatcagtgcgaggtcggcatgaggtcggcatgatcgtgggtaagggctccttgcacccctgccccttccagactgctgaggctccctgtgtacaacaggcttcaagggccctgtggggtgaggaccaaactac

SEQ ID NO: 10034 - DNA, 215 bp, Artificial Sequence; identical to SEQ ID NO: 10027
  Synthetic polynucleotide

SEQ ID NO: 10035 - DNA, 217 bp, Artificial Sequence; identical to SEQ ID NO: 9942
  Synthetic polynucleotide

SEQ ID NO: 10036 - DNA, 204 bp, Artificial Sequence
  Synthetic polynucleotide
tctccatacaggtcttctttggcaatgtggattcatctgggataaaacacaatatttttaaccctccaattattgctcgatacatccgtttgcacccaactactcattatagcattcgcagcactcttcgcatggagttgatgggctgtgatttaaatagtaagtgccaagtcatcccatatccttcttccctcaaccatgggt

SEQ ID NO: 10037 - DNA, 211 bp, Artificial Sequence
  Synthetic polynucleotide
cagtcccctgcgcccaggcctagctactatgggcacccagcctgctacacaccaccccatccccacctacccctcctatgtgccggcggctgcccacgactgcccacgactacagcagcggactcttccaccccggaggcttcctggggggaccggcctccagcttcacccctaagcagcgcagcaaggctcgttcctgttcaggtaaagg

SEQ ID NO: 10038 - DNA, 218 bp, Artificial Sequence; identical to SEQ ID NO: 9848
  Synthetic polynucleotide

SEQ ID NO: 10039 - DNA, 219 bp, Artificial Sequence
  Synthetic polynucleotide
ccttttcccttccacctctttttggcttgtgctcctggcccctgagccctccccacaacctctgtcctccttaggttttcgtcatcgaggtgaagacaaaaggaggatcaaggaggatccaagtacctcatctaccgccgctaccgccagttccatgctttgcagagcaagctggaggagcgcttcgggccagacagcaagagcagtgccctggcctgt

SEQ ID NO: 10040 - DNA, 210 bp, Artificial Sequence; identical to SEQ ID NO: 9974
  Synthetic polynucleotide

SEQ ID NO: 10041 - DNA, 219 bp, Artificial Sequence
  Synthetic polynucleotide
gttaggccacttcactgggtcatgattcacagaccactggttgacaaaaaccacagtgtccttgggaatgtggtagcccaagacagaggtgttggcagtggtggcatgaggtggcatgaggaatagtgacaggcacaaagctggagaagcgcatggcttcataaaggaaggccaggacatagggcaggttgggctggtcacccatacaaggcagacggt

SEQ ID NO: 10042 - DNA, 215 bp, Artificial Sequence
  Synthetic polynucleotide
caatgccaccaaaggctgtgacgagtctgtggatgaggtcacagcaccatgtagctgccaagactgctctattgtctgtggccccaagccccagcccccacgccccagcccccacctcctcctgctccctggacgatccttggcttggacgccatgtatgtcatcatgtggatcacctacatggcgtttttgcttgtgttttttggagcattttt

SEQ ID NO: 10043 - DNA, 206 bp, Artificial Sequence
  Synthetic polynucleotide
tgacccttccttcttgaccccatcgcaggcaggggtgtggggaagaacgaggaactgcgtctttatcaccatctcttcaacaactatgacccaggaagccgagccggccagtgcgggagcctgaggatactgtcaccatcagcctcaaggtcaccctgacgaatctcatctcactggtaagctacccccaccctcatcttaagcca

SEQ ID NO: 10044 - DNA, 218 bp, Artificial Sequence
  Synthetic polynucleotide
gtgacctctcgtgtccccaggacacgctaggctcctggcagcgctgtgtgaccacgtgtgagacagccctgaagcaagggaaacgggtcgccatcgacaacgggtcgccatcgacaacacaaacccagacgccgcgagccgcgccaggtagcgtgaccgcggggccgtaggtggcctgcggcggggtgggcggggcctgcacatccagctccttcccc

SEQ ID NO: 10045 - DNA, 227 bp, Artificial Sequence; identical to SEQ ID NO: 9935
  Synthetic polynucleotide

SEQ ID NO: 10046 - DNA, 219 bp, Artificial Sequence; identical to SEQ ID NO: 10003
  Synthetic polynucleotide

SEQ ID NO: 10047 - DNA, 212 bp, Artificial Sequence; identical to SEQ ID NO: 9981
  Synthetic polynucleotide

SEQ ID NO: 10048 - DNA, 209 bp, Artificial Sequence
  Synthetic polynucleotide
tcctggagttccagccactggccggcaaccttgctctcaccttgctctccccactggcccaggtgcggcagaaggtgcgcatagtgagccgagaggccgagaggccgaggcggccgaggccgaggagccgtggggcgaggaagcccgggaaggccggcggcggggcccacggcgggagtccaagccagaggagcccccgccgcccaaga

SEQ ID NO: 10049 - DNA, 212 bp, Artificial Sequence
  Synthetic polynucleotide
cccctttgactctgtggagccgcctaaaagacccaccagcagactcatcatgcacagcatggccatgttcggaagagagttctgctacgcggtggaggcagggtggaggcagcgtatgtgaccccagtcctgctcagcgtaggtctgcccagcagcctgtacagcattgtgtggttcctcagccccatcctgggattcctgctgcagcccgt

SEQ ID NO: 10050 - DNA, 210 bp, Artificial Sequence
  Synthetic polynucleotide
caagagctgctgcaggcctacggcaaggactacatcgagcacttgcatgggcagttcctgcactcgctacgcctggccatgtccgacctcaccccagttgccccagttgtagatgccatcacagatgcgctgctggcagctcggccccgccgccgctattaccccggccagggcctggggctcatgtacttcatccactactacctgcct

SEQ ID NO: 10051 - DNA, 227 bp, Artificial Sequence
  Synthetic polynucleotide
ctgggaaagcactggagaaatgggatttgtttaaactatgacagcattatttcttgttcccttgtcctttttcctgcaagcaggaagggaacctgattggattaccccttctggattaccccttctgattgacaactatgtgccccctttggagggactgcctatcttcattcttcgactagccactgaggtcagtgatcaagcagatactaagcatttcggtacat

SEQ ID NO: 10052 - DNA, 206 bp, Artificial Sequence
  Synthetic polynucleotide
tcctcttctatgtctcgtggctgcagcaccagcctaggaattcccgggcccgggggccccgtcgtgcctctgctgccggcccccgtgtcaccgtcctggtctggtgcgggagttcgaggcatttgacaacgcggtgcccgagctggtagactccttcctgcagcaagacccagcccagcccgtggtggtggcagccgacacgctcc

SEQ ID NO: 10053 - DNA, 205 bp, Artificial Sequence
  Synthetic polynucleotide
gaaatgtctctcttctattctaggggagtatatctctgaaagaactgaatgcccgacccttagaagttttcatgtgtagtgtgctcaaaagacaaggttacttacggagaaggcttccgctggatggcacagtacattgattaacacaaactcacattggttccaggtctcaacgttcaggcttactcagagatttgattgctca

SEQ ID NO: 10054 - DNA, 218 bp, Artificial Sequence
  Synthetic polynucleotide
tgctgtctcagctggcctcgtcctgggctccgaacatgagacccgtctggtggcaaagctatttaaagactacagcagcgtggtgcggccagtggaagaccgcggccagtggaagaccaccgccaggtcgtggaggtcaccgtgggcctgcagctgatacagctcatcaatgtggtgagacaagagcactgggggcctgcccacacacccacacctct

SEQ ID NO: 10055 - DNA, 210 bp, Artificial Sequence
  Synthetic polynucleotide
tcgggaaaccagagaatatgactttattgctgcacaattcaaatacttttctttctacaacatgtatatagtcacccagaaagcagactacccgaatatcccgaatatccagcacttactttacgacctacacaggagtttcagtaacgtgaagtatgtcatgttggaagaaaacaaacagcttcccaaaatgtggctgcactacttcag

SEQ ID NO: 10056 - DNA, 210 bp, Artificial Sequence
  Synthetic polynucleotide
accctggctatgccatggtgcggctggtcaagtgcgacgtctacccctgccccaacacagtggactgcttcgtgtcccgccccaccgagaaaaccgtcttaaccgtcttcaccgtcttcatgctagctgcctctggcatctgcatcatcctcaatgtggccgaggtggtgtacctcatcatccgggcctgtgcccgccgagcccagcgcc

SEQ ID NO: 10057 - DNA, 209 bp, Artificial Sequence
  Synthetic polynucleotide
tctgtctctttcagtcaggcctgggtctctcaagcttttgtgtctgtgcctgtctgagcccccatgggtgctgcctcttccccctgcaggagactactggactactggattgaccccaaccaaggctgcaccttggacgccatgaaggttttctgcaacatggagactggcgagacttgcgtctaccccaatccagcaaacgttcccaa

SEQ ID NO: 10058 - DNA, 215 bp, Artificial Sequence; identical to SEQ ID NO: 10013
  Synthetic polynucleotide

SEQ ID NO: 10059 - DNA, 215 bp, Artificial Sequence
  Synthetic polynucleotide
acccgcccgcccgcccctatgaccaacatgagctggagcttcctgacgcggctgctggaggagatccacaaccactccaccttcgtgggcaaggtgtggcgggcaaggtgtggctcacggtgctggtggtcttccgcatcgtgctgacggctgtgggcggcgaggccatctactcggacgagcaggccaagttcacttgcaacacgcggcagcca

SEQ ID NO: 10060 - DNA, 206 bp, Artificial Sequence
  Synthetic polynucleotide
tggtggccagcagcagctacaacatggtcatccgggaggacaaccagaccaaccgcctgcaggaggctctgaacctcttcaagagcatctggaacaacagaacaggtttgtggagtgaccgcccaccccctgcgcttgcccaggaggccctggtctgcactgtttatagagaagaaccccgtgcaagcattccagacccctggccg

SEQ ID NO: 10061 - DNA, 209 bp, Artificial Sequence; identical to SEQ ID NO: 10011
  Synthetic polynucleotide

SEQ ID NO: 10062 - DNA, 218 bp, Artificial Sequence
  Synthetic polynucleotide
tctggcaccggaggtggcggcggcggcggcggggcgagcggcgggactagcggcagctgcagccccgcgtcctcggagccgccggctgcgcccgccgaccggctgcgcccgccgaccgcctgcgcgccgagagcccgtcgccgccgcgcctgctggccgcgcactgcgcgctgctgcccaagccgggcttcctgggcgcgggcggcggcggcggcggc

SEQ ID NO: 10063 - DNA, 218 bp, Artificial Sequence; identical to SEQ ID NO: 9862
  Synthetic polynucleotide

SEQ ID NO: 10064 - DNA, 213 bp, Artificial Sequence; identical to SEQ ID NO: 9896
  Synthetic polynucleotide

SEQ ID NO: 10065 - DNA, 218 bp, Artificial Sequence; identical to SEQ ID NO: 10044
  Synthetic polynucleotide

SEQ ID NO: 10066 - DNA, 210 bp, Artificial Sequence
  Synthetic polynucleotide
ttcaccggcctctcggggctccgccgactcttcctcaaggacaacggcctcgtgggcattgaggagcagagcctgtgggggctggcggagctgctggagctgctggagctcgacctgacctccaaccagctcacgcacctgccccaccgcctcttccagggcctgggcaagctggagtacctgctgctctcccgcaaccgcctggcagag

SEQ ID NO: 10067 - DNA, 210 bp, Artificial Sequence
  Synthetic polynucleotide
catgcactggctgtccaccatcatccccacgcaccacatcaacgcgctcatcttcttcttcatcgtcagcaacctcaccatcgacttcttcgccttcttcgccttcttcatcccgctggtcatcttctacctgtccttcatctccatggtgatctgcaccctcaaggtgttccaggacagcaaggcctgggagaacttccgcaccctcac

SEQ ID NO: 10068 - DNA, 220 bp, Artificial Sequence
  Synthetic polynucleotide
ttgatgttgctacccatgttcccctgatattctatgttcctggaaggacggcttcacttccggaggcaggcgagaagcttttcccttacctcgacccttttcccttacctcgacccttttgattccgcctcacagttgatggagccaggtataaaatatgctgaaatgatattgcttgacagtaagatcacctttagtttatatgtgaaccactttattg

SEQ ID NO: 10069 - DNA, 205 bp, Artificial Sequence
  Synthetic polynucleotide
ttttaattgaagtttcctttttttccttgcagaatccaagaaaacaggggcccgaaacccaaggcagtacagcagaattaattacagggctcgtccaactaactggtccctcagtcacacatgccagagattgctcaggaagcaatggaggtaaggggaaaatgaattccatgttcttgaaggaaagattgtaactatgtacatt

SEQ ID NO: 10070 - DNA, 209 bp, Artificial Sequence
  Synthetic polynucleotide
ggtggggggagctgacctagtggaagctgagcctcagtgtccccctccctcagccacccaacctccttcggagcagccgggaacagatggccagctggccagctggccctgatcctgggccccgtgctggccttgctggccctggtggccctgggtgtcctgggcctgtggcatgtccgacggaggcaggagaagcagcgtggcctgca

SEQ ID NO: 10071 - DNA, 219 bp, Artificial Sequence; identical to SEQ ID NO: 9852
  Synthetic polynucleotide

SEQ ID NO: 10072 - DNA, 216 bp, Artificial Sequence; identical to SEQ ID NO: 10014
  Synthetic polynucleotide

SEQ ID NO: 10073 - DNA, 211 bp, Artificial Sequence
  Synthetic polynucleotide
tctaacttttcattgtcctcaaagattaagattcttaaacatgttcctgaaggtgctgagacagagcaaggccttaaacgggagcttcaagttcttaggtattcttaggtacatcatgtattcatatgactactttgtttttttctttaaaaaaaaaattattagtttttatatactccgaattgctacaactagagacaagcatttttcg

SEQ ID NO: 10074 - DNA, 211 bp, Artificial Sequence; identical to SEQ ID NO: 9949
  Synthetic polynucleotide

SEQ ID NO: 10075 - DNA, 217 bp, Artificial Sequence
  Synthetic polynucleotide
cactacctgcagttggccggcgacacggatgaagaactcaacagctgcaccgctgtggactggctggtcctcgccgcgaagcagggccgtcgcgaggctgggccgtcgcgaggctgtgaagctgcttcgccggtgcttggcggacagaagaggtgggtctgtgtgaggcttagaacagcctctggagggttgagcagcttgtaatgctgcttgctaa

SEQ ID NO: 10076 - DNA, 211 bp, Artificial Sequence
  Synthetic polynucleotide
cccggcctggggctctgtgtgtttcagcactctacccagaccctcccggccccagggtccacacgtgctcggccgcaggaggcttcagcaccagcgattaccagcgattacgacgttggctgggagagtcctcacaatggctcggggacgtgggcctattcagcgccggatctgctggggtgagcagagcgagggccccgggcgtctacgc

SEQ ID NO: 10077 - DNA, 212 bp, Artificial Sequence
  Synthetic polynucleotide
ccaggccgccggggaagccatggtgggtgcctcaaggccaccccccaagccgctgcgtccgcggcagctgcaggaggttggccgccagagctcctcggacgctcctcggacagcggcatcgccactggcagccactcctcttactccagcagcctctcgtcctacgcgggcagcagcctggacgtgtggcgggccacagatgaactgggctc

SEQ ID NO: 10078 - DNA, 208 bp, Artificial Sequence
  Synthetic polynucleotide
ccaccacatccacccaggtcatggtgatcaaacgccccggcaggaagcgaaaagctgaggccgaccctcaggccattcccaagaaacggggccgaaagccgaaagccggggagtgtggtggcagccgctgccgccgaggccaaaaagaaagccgtgaaggagtcttctatccgatctgtgcaggagaccgtactccccatcaagaagc

SEQ ID NO: 10079 - DNA, 214 bp, Artificial Sequence
  Synthetic polynucleotide
tacttttccctccccatagttaccgtacacgagaagaaattcaggaagtaagaagtaagagtgaccctattatgcttctcaaggacaggatggtgaacagggatggtgaacagcaatcttgccagtgtggaagaactaaaggtacagtcacttgttcatggtggtttgaaggttggctttaaaagttgccacccctgggtggccacagagtttg

SEQ ID NO: 10080 - DNA, 219 bp, Artificial Sequence
  Synthetic polynucleotide
gggtggcttgcagcctggcccattttccctccccaggagtatggggcacccatcgtggaccccattaacgacatccgcatcattgccgtggtctcggtcattggcgtggtctcggtcactgtgctgctggccatctccctggctggcatggagtgggagtccaaggtgaggaggccatggaggagggggacatggaggtggtcacgtggagaagcgggg

SEQ ID NO: 10081 - DNA, 218 bp, Artificial Sequence; identical to SEQ ID NO: 10008
  Synthetic polynucleotide

SEQ ID NO: 10082 - DNA, 211 bp, Artificial Sequence
  Synthetic polynucleotide
cttcggccggttcaaggtgaacagcgaggaggaggaggaggacgcactgaccctgtcctcggccatgtggttctcctggggcgtcctgctcaactccggcatcggcatcggggaaggtaaggccccgcccggcccgcctggtcccgcctcggccctctagggtctgacagagccccccgcccgcccacaggcgcccccagaagcttctcag

SEQ ID NO: 10083 - DNA, 219 bp, Artificial Sequence; identical to SEQ ID NO: 9937
  Synthetic polynucleotide

SEQ ID NO: 10084 - DNA, 208 bp, Artificial Sequence
  Synthetic polynucleotide
gatggacatccattcctggctgtattcatgtgttgttgttgttattgttttaattgttcttatttacatgcaggttattggttgaattcccagcaacaggcaacaggtggtgtgattccatcttggcaatttcagcctttaaagctgatccgatatgtcacaacttttgatttcttcctggcagcctgtgagattatcttttgtttct

SEQ ID NO: 10085 - DNA, 214 bp, Artificial Sequence; identical to SEQ ID NO: 10004
  Synthetic polynucleotide

SEQ ID NO: 10086 - DNA, 212 bp, Artificial Sequence
  Synthetic polynucleotide
catgatttcctgctggttccccgagagctgagtggctcctccccagtcctggaggagactcacccagctcaccagcagggagccagcagaccagggccccaccagggccccgggatgcccaggcacaccccggccgtcccagagcagtgcccacacagtgcgacgtcccccccaacagccgcttcgattgcgcccctgacaaggccatcacc

SEQ ID NO: 10087 - DNA, 219 bp, Artificial Sequence; identical to SEQ ID NO: 9937
  Synthetic polynucleotide

SEQ ID NO: 10088 - DNA, 212 bp, Artificial Sequence
  Synthetic polynucleotide
gccactggacacaggataaggcccagcgcacaggcccccacgtggacagcatggaccgcggcacgctccctctggctgttgccctgctgctggccagctgctggccagctgcagcctcagccccacaagtaggtgtccagggacccagggtggggagactcggcctccggtgcacggaccaggccccaagtattcccggcctccttcctgta

SEQ ID NO: 10089 - DNA, 221 bp, Artificial Sequence
  Synthetic polynucleotide
gcttagggaatagaaagtggtgtagagaatataacttcaattacttctttcatcatttttcttcctttagtccacaagccctagccatgccgtggtagccaatgttcagccaatgttcagcttgtcttgcatctaatgaagcaacacagtaaagctttgtgcaatgatcgagtcatcaacagtattcctttggcaaagcaagtatcttcacgaggtggtaa

SEQ ID NO: 10090 - DNA, 209 bp, Artificial Sequence
  Synthetic polynucleotide
gttcctcattatatagaatgagagaacatcatttctctccttttcctcccaggtggccgtcgaggaccgagtcaggcagctgcatgaagcccacagggactcagggactttggtccagcatctcagcactttctttccagtaagtcattttcagcttttatcacttaactttattgcatcttgattaataagaataacagttgaaaaaa

SEQ ID NO: 10091 - DNA, 207 bp, Artificial Sequence
  Synthetic polynucleotide
agttcattggaacagaaagaaatggatttatctgctcttcgcgttgaagaagtacaaaatgtcattaatgctatgcagaaaatcttagagtgtcccatctgcatctggtaagtcagcacaagagtgtattaatttgggattcctatgattatctcctatgcaaatgaacagaattgaccttacatactagggaagaaaagacatgtc

SEQ ID NO: 10092 - DNA, 205 bp, Artificial Sequence
  Synthetic polynucleotide
accatgagtgactgtctttagtcaaaaaccctccccacctgaagtagcactttcattaccctagagtcaccatcctggtaaatagagggttcgttcccaggcaggaagaaagtgaatcctgaaacccggcagaaaggccaggtaagggacatggactcttcctactttagagaaggctctgggagtccaccaggctccatgcaat

SEQ ID NO: 10093 - DNA, 205 bp, Artificial Sequence
  Synthetic polynucleotide
gatggttatggtaaaagaggtcaaatgaaaccctcgattgaatcctattctgaagatgatgaaagtaagttttgcagttatggtcaatacccagccgaccgacctagcccataaaatacatagtgcaaatcatatggatgataatgatggagaactagatacaccaataaattatagtcttaaatattcagatgagcagttgaac

SEQ ID NO: 10094 - DNA, 207 bp, Artificial Sequence
  Synthetic polynucleotide
ataattttttggcatgtttacccaggtacccagaagctattactgaccctgcctacaaaggacagattctcacaatggccaaccctattattgggaatgggaatggtggagctcctgatactactgctctggatgaactgggacttagcaaatatttggagtctaatggaatcaaggtagtaccagtggtggccatttaaaaagtct

SEQ ID NO: 10095 - DNA, 211 bp, Artificial Sequence; identical to SEQ ID NO: 10037
  Synthetic polynucleotide

SEQ ID NO: 10096 - DNA, 221 bp, Artificial Sequence
  Synthetic polynucleotide
tagcccctgctcggccttcgagttccactgcctaagtggcgagtgcatccactccagctggcgctgtgatggtggccccgactgcaaggacaaatctgacactgcaaggacaaatctgacgaggaaaactgcggtatgggcggggccagggtgggggcggggcgtcctatcacctgtccctgggctcccccaggtgtgggacatgcagtgatttaggtgcc

SEQ ID NO: 10097 - DNA, 209 bp, Artificial Sequence
  Synthetic polynucleotide
ttccttcttcaactagattacagatctgcttgatgttgtactagacagtttcatcaaaaccagtgcaacaggtggcttgggatcaataaaagctgaggtgctgaggtgatggcagatactgctgtagctttggcttctggaaatgtgaaattggtttcaagcaaggtaatcacttttcttttgccttctgtactatagcatatctgttt

SEQ ID NO: 10098 - DNA, 209 bp, Artificial Sequence
  Synthetic polynucleotide
ggcgataggccacggccatgtggtactggctcatggcccggtacttcaggctccagcctttgccatagttgttgacaagctctgccgccttgcaggggaagaacagaacagggctttctcgtagtcctgcaggggacatggaatggaaggaggcaaactgagtggcagaggctgccccaagtcaagggctcctgggctaggtttctcta

SEQ ID NO: 10099 - DNA, 205 bp, Artificial Sequence
  Synthetic polynucleotide
cagggtcgtcagacaccaaaacatatttctgaaagtctaggagctgaggtggatcctgatatgtcttggtcaagttctttagctacaccacccacccttacttagttctactgtgctcataggtaataatagcaaatgtgtatttacaagaaagagcagatgaggttgataattgtcatctctaatacttctgttaaaaggaaat

SEQ ID NO: 10100 - DNA, 205 bp, Artificial Sequence
  Synthetic polynucleotide
gaccctcatgccaccccactgcaggagacgcttcatctgaaggaaaaggagggctgcccccaggccttccacgccctcctgtcctggctgctgacccaggcaggactccacagccatcctggacttctggagggtgctgttcaaggactacaacctggagcgctatggccggctgcagcccatcctggacagcttccccaaaggt

SEQ ID NO: 10101 - DNA, 209 bp, Artificial Sequence
  Synthetic polynucleotide
aggagcttcaaggaggctttgcggggcagagctggggctgggtgcagcctgaggtgtccacctggccttcccaggccccctgctgccataccaagccgagaagccgagttcctggtgcgcagccacgatgcggaggaggtgctgccctcaacacctgccagccgcttcctctcagccttggggggactctgggagcccggagagcttca

SEQ ID NO: 10102 - DNA, 209 bp, Artificial Sequence
  Synthetic polynucleotide
ccctaggagggacttcccaaccctgacaggcggcgggcaggtgggcagggcctcgcagtccagcttccccaccttgtctgcctccacagggggactccgggactccggcagccccttggtctgcaacgggctaatccacggaattgcctccttcgtccggggaggctgcgcctcagggctctaccccgatgcctttgccccggtggcac

SEQ ID NO: 10103 - DNA, 209 bp, Artificial Sequence
  Synthetic polynucleotide
gctttggcccttggtgataggtggctcggcccgccctacctggcaccctgaccctggtcacggcctctccctccagcaggatacagacgtccctcaccagctcaccagtgccagcttggggtctgcagatgagaactccgtggcccaggctgacgatagcctgaaaaacctccacctggagctcacggaaacctgtctggacatgatgg

SEQ ID NO: 10104 - DNA, 215 bp, Artificial Sequence; identical to SEQ ID NO: 10030
  Synthetic polynucleotide

SEQ ID NO: 10105 - DNA, 215 bp, Artificial Sequence
  Synthetic polynucleotide
aaaatagcccagtataagcgggagtgcccgtccatctttgcttgggaaatccgagacagattactgtccgagggggtctgtaccaacgataacataccaaggataacataccaagcgtaagttcattgagaacatctgccctccctgccctaagcccaatgctctctcctctttacctcctcccaccctctctctccactgtctcttagtctgtg

SEQ ID NO: 10106 - DNA, 212 bp, Artificial Sequence
  Synthetic polynucleotide
acctcaagaaggccctgctcctccagggctccaacgagatcgagatccgcgccgagggcaacagccgcttcacctacagcgtcactgtcgatggctgcacgatggctgcacggtgagtgcccagaatccccaggcagggccccacctctccggccttgggctttttggccaggccatagtgccctctctccatcactcccacgtggtaatgc

SEQ ID NO: 10107 - DNA, 209 bp, Artificial Sequence
  Synthetic polynucleotide
gtgatcccggtgggcattgggccccatgccaacctcaagcagatccgcctcatcgagaagcaggcccctgagaacaaggccttcgtgctgagcagtgtggaagtgtggatgagctggagcagcaaagggacgagatcgttagctacctctgtgaccttgcccctgaagcccctcctcctactctgccccccgacatggcacaagtcact

SEQ ID NO: 10108 - DNA, 212 bp, Artificial Sequence
  Synthetic polynucleotide
ggatactgcacggacttccaggcagtgccaggctgtggaattgggtgcaaagtcagcaacgtggaaggcatcctggcccacagtgagcgccctttgagtgccctttgagtgcaccggccagtcacctgaatgaggctggcagccttcccgcagaaaaaggtattgctggcttttgtctctgcagctggttaaaagtagaggtgggtcaaacc

SEQ ID NO: 10109 - DNA, 209 bp, Artificial Sequence
  Synthetic polynucleotide
gacttagcatgttttcctttaacatttttctagaaaacagaatcttggcattgtcttcctcaagaaatggactcttcccaaaccttggatacatcccagactagactaggtttaatgtgagaacggaagatactgaagtgacagacttcccctctctggaggagggcatattgacgcaatcagaaaatcaagtaaaggaacccaacaga

SEQ ID NO: 10110 - DNA, 217 bp, Artificial Sequence
  Synthetic polynucleotide
cagagggcagaggcctagcaactgcccctccccctgcagcagtggtgcgactatcgcctgcgctgggatccgcgagactacgaaggcctgtgggtgctgagggtgccgagggtgccgtccaccatggtgtggcggccggatatcgtgctggagaacaagtgaggagggggtgcaggcaggggtgtgggggacaaaggacacagggtctgggcccagc

SEQ ID NO: 10111 - DNA, 212 bp, Artificial Sequence
  Synthetic polynucleotide
cccccaggcctgggggcagaatctgccataaccagcttcgtgtctccagggcggcgtgatggatgacaagagtgaagattccatgtccgtctccaccttgtctccaccttgagcttcggtgtgaacagacccacgatttcctgcatattcgactgtaagtgaggcttcgaggcctctatggggtgataagggtgtgtcaccttatgcttctg

SEQ ID NO: 10112 - DNA, 209 bp, Artificial Sequence
  Synthetic polynucleotide
aaaatcactgtaaagacatgtggttctttatttataggcattttggaactgggtagaaaattatccagatgaatttacaaaactgtaccagatcccacagtcccacagactgatatggctggtaaggatacgattgattttttttttttttttgtcttttaaatgcctacttgtgacataaaaacctatcatcgttttccaagttattt

SEQ ID NO: 10113 - DNA, 207 bp, Artificial Sequence
  Synthetic polynucleotide
ttattattagaaaaataatgagctcagtatttaccaagacagatccttcctgtggcatccaaagtcattccactgggacactgacacttgaatgaccccctagctagtgttaacacacaggccatttttacacactcctgggaacacttcacattcatctatatctaaaaagaaaaaaaaagtataaagttaatatatctttataat

SEQ ID NO: 10114 - DNA, 212 bp, Artificial Sequence; identical to SEQ ID NO: 10077
  Synthetic polynucleotide

SEQ ID NO: 10115 - DNA, 214 bp, Artificial Sequence
  Synthetic polynucleotide
cgtacacgagaagaaattcaggaagtaagaagtaagagtgaccctattatgcttctcaaggacaggatggtgaacagcaatcttgccagtgtggaagaacagtgtggaagaactaaaggtacagtcacttgttcatggtggtttgaaggttggctttaaaagttgccacccctgggtggccacagagtttgtgtgggttcctccaagcccagaa

SEQ ID NO: 10116 - DNA, 208 bp, Artificial Sequence
  Synthetic polynucleotide
tcacagagtatcatgtctcccttgttgctcctttcaggtaaagaagcagattttagatgaaaagatctactgccctcctgaggcttctgtgctcctggctcctggcttcttacgccgtccaggccaaggtaggctcaaagaagaaaaatgtatttttcctgggcgttaatttgggtcatgggatcactcctatcttctctttctttgg

SEQ ID NO: 10117 - DNA, 219 bp, Artificial Sequence; identical to SEQ ID NO: 10039
  Synthetic polynucleotide

SEQ ID NO: 10118 - DNA, 209 bp, Artificial Sequence
  Synthetic polynucleotide
tttagactccagaactccccacttgccgcgttctcgccgccgcaggctcccgggacgatggtgccccgcctgctgctgcgcgcctggccccggggccccggggccccgcggttggtccgggagcccccagtcggcccctcagcgccggctccgggcccggccagtacctgcagcgcagcatcgtgcccaccatgcactaccaggacagc

SEQ ID NO: 10119 - DNA, 211 bp, Artificial Sequence
  Synthetic polynucleotide
gagaagaatggaaataaccgaaagctgcgggtttgtgttgctacttgtaaccgtgcagattattctaaacttgccccgatcatgtttggcattaaaaccgattaaaaccgaacctgagttctttgaacttgatgttgtggtacttggctctcacctgatagatgactatgggtaagatgaaagcattttcttattcttcattgcaacagtg

SEQ ID NO: 10120 - DNA, 209 bp, Artificial Sequence
  Synthetic polynucleotide
atgcttatggacaaaaatgctacagctttgaggctaaatcatatgtcaaataaaactacttcatcaaaaaacatggaaatggtccaacagaaaaaagagggaaagagggccccattccaccagatgcacaaaatccagatatgtcgttctttaagatgctattcttgccagaatcagcaaggtggatacaaaggactcatggaaagaac

SEQ ID NO: 10121 - DNA, 218 bp, Artificial Sequence; identical to SEQ ID NO: 9849
  Synthetic polynucleotide

SEQ ID NO: 10122 - DNA, 204 bp, Artificial Sequence
  Synthetic polynucleotide
ggtttcgagtcaggggaggtcacaccggaccagatcacctgctctaacccggagcagtatgtgggctggtattcttcgtggactgcaaacaaggcccggctgctcaacagtcaaggctttgggtaagcagggcccggggattttttttcatgtgcttttaaaaaaaaataggcctctctaccagcgtggccaacacagtgaaac

SEQ ID NO: 10123 - DNA, 214 bp, Artificial Sequence
  Synthetic polynucleotide
tccatcctccccttccctctgactcttctcttttcccagcctacctctcctctcccctggccctgcccagccagaggaggagcccccccgaggagccaccccgaggagccacctgacttctgctgtcccaagtgccagtatcaggcccctgatatggacaccctgcagatacatgtcatggagtgcattgagtagggccggccagtgcaaggcc

SEQ ID NO: 10124 - DNA, 205 bp, Artificial Sequence
  Synthetic polynucleotide
agagtgcagccgccgcccacccgacgccaggcctcgctccccgcctggcctgtccgcttcagtgttccatccgcgtctgtctccccgcaggccccggacggacggtgacggtgaaggtggaactgagctgcgcacccggggatctcgatgccgtcctcatcctgcagggtcccccctacgtgtcctggctcatcgacgccaacca

SEQ ID NO: 10125 - DNA, 208 bp, Artificial Sequence
  Synthetic polynucleotide
acagggtgggccatcatgagacataatgatctcatccccccctaagagctggctgtacctgaaaggatcatacatgcgctgtgaccgcaagatggaggtgggaggtggcgttcatggtgtgtgccatcaacccttccattgacctgcacaccgactcgctggagcttctgcagctgcagcaggtgagggctgagccaatggggcagga

SEQ ID NO: 10126 - DNA, 217 bp, Artificial Sequence; identical to SEQ ID NO: 9926
  Synthetic polynucleotide

SEQ ID NO: 10127 - DNA, 218 bp, Artificial Sequence; identical to SEQ ID NO: 9944
  Synthetic polynucleotide

SEQ ID NO: 10128 - DNA, 212 bp, Artificial Sequence
  Synthetic polynucleotide
caggatctggcaagtctgaaaatccctgagcaatttcgacatgcgatctggaagggcatcctggaccaccggcagctccacgaattctcctccccttctcctccccttctcatctcctgcggaccccaagcagtgcctctacagtcagtgtgggctccagtgagacccggggtgagcgtgttattgatgctgtgcgattcaccctccgccag

SEQ ID NO: 10129 - DNA, 214 bp, Artificial Sequence; identical to SEQ ID NO: 9967
  Synthetic polynucleotide

SEQ ID NO: 10130 - DNA, 218 bp, Artificial Sequence
  Synthetic polynucleotide
gtgagtcagtgtgcagcatttgaaaaccccaagggactaattcatggttgttccaaagataatagaaatgacacagaaggctttaagtatccattgggacaaagtatccattgggacatgaagttaaccacagtcgggaaacaagcatagaaatggaagaaagtgaacttgatgctcagtatttgcagaatacattcaaggtttcaaagcgccagtca

SEQ ID NO: 10131 - DNA, 208 bp, Artificial Sequence
  Synthetic polynucleotide
tctctctgcctattggtctattttcccacccttaggctgctggtggtctacccttggacccagaggttctttgagtcctttggggatctgtccactcctgactcctgatgctgttatgggcaaccctaaggtgaaggctcatggcaagaaagtgctcggtgcctttagtgatggcctggctcacctggacaacctcaagggcaccttt

SEQ ID NO: 10132 - DNA, 219 bp, Artificial Sequence
  Synthetic polynucleotide
tctctttgtcctgactgctcaaatcccatgttttcaggatttatcagtcttgtactaaggcatggaacttttagccattctgcagttttcatgggtatgtcctcatgcatcctcatgcaccaaaatgattggttccacagaatcttcaagtaagtcattaaggtcatcaactttaatgtcacaataacagcattcgtgaattggcttcatgataagttt

SEQ ID NO: 10133 - DNA, 205 bp, Artificial Sequence
  Synthetic polynucleotide
tcgctgctatacactgacctgtctcataaaaagggggactctatagtctattgacgttttcttttccatgtgcagaaggaggcaatgtatatgcaactggttggtggaaataatgaaggacagttggggcttggtgacaccgaagaaagaaacacttttcatgtaattagcttttttacatccgagcataagattaagcagctgt

SEQ ID NO: 10134 - DNA, 205 bp, Artificial Sequence
  Synthetic polynucleotide
acgagtttcgctgccacgatgggaagtgcatctctcggcagttcgtctgtgactcagaccgggactgcttggacggctcagacgaggcctcctgcccggtcggtgctcacctgtggtcccgccagcttccagtgcaacagctccacctgcatcccccagctgtgggcctgcgacaacgaccccgactgcgaagatggctcggatg

SEQ ID NO: 10135 - DNA, 206 bp, Artificial Sequence
  Synthetic polynucleotide
gaagctccttgtcaagatgccttttcaaacttcgccagggggcaaggctgaggggggtggggccaccacatccacccaggtcatggtgatcaaacgccccgccccggcaggaagcgaaaagctgaggccgaccctcaggccattcccaagaaacggggccgaaagccggggagtgtggtggcagccgctgccgccgaggccaaaaa

SEQ ID NO: 10136 - DNA, 209 bp, Artificial Sequence; identical to SEQ ID NO: 9989
  Synthetic polynucleotide

SEQ ID NO: 10137 - DNA, 209 bp, Artificial Sequence
  Synthetic polynucleotide
cagggccatgatgcctgttcctccccacacccctcgccctcctggctggcgccgccagattgaccaagtctccctcccgtcctcccccagaaaaaggtgcaaaggtgcactgcctcaacatggacagcctctctttccagctgggcctctacctcagcccacacttcctccaggcctccaacaccatcgagccggggcagcagagcttt

SEQ ID NO: 10138 - DNA, 212 bp, Artificial Sequence
  Synthetic polynucleotide
ggtgcccattgtgtccttggagtgtgtgtcctgcaaggcacaggccgtgtacgaagtgagccgcagctcctacgtgtacttggagggccgctgcctcaattttgcctcaattgcagcagcggctccaagcgaggggtgagtgttgagcggggtgtgggcgggctggggatgggtcccatggccgaggggacggggcctgcaggcagaagtgg

SEQ ID NO: 10139 - DNA, 210 bp, Artificial Sequence
  Synthetic polynucleotide
gctcaatggaaatctgcgtgataaaggtggagatcaaggacctgaacgacaatgcgcccagtttcccggcagcacagatcgagctggagatctcggaggcatcggaggcagccagccctggcacgcgcatcccgctggacagcgcttacgatccagactcaggaagctttggcgtgcagacttacgagctcacgcccaacgagctgttcg

SEQ ID NO: 10140 - DNA, 212 bp, Artificial Sequence
  Synthetic polynucleotide
tccctgagtgcctgcaggctgacatctgcctgcacctgaaccgctcactgctgcagcactgcaaacccttccgaggggccaccaagggctgccttcgggccgccttcgggccctggccatgaagttcaagaccacacatgcaccgccaggggacacactggtgcatgctggggacctgctcaccgccctgtacttcatctcccggggctcca

SEQ ID NO: 10141 - DNA, 215 bp, Artificial Sequence; identical to SEQ ID NO: 9933
  Synthetic polynucleotide

SEQ ID NO: 10142 - DNA, 205 bp, Artificial Sequence
  Synthetic polynucleotide
gaggcctgtcctgcactgtgtgcatcccctagatttggagatggctatatcgtcacaatgaagatcaaatccccgaaggacgacctgcttcctgacctgaatgaaccctgtggagcagttcttccaggggaacttcccaggcagtgtgcagagggagaggcactacaacatgctccagttccaggtctcctcctcctccctggcg

SEQ ID NO: 10143 - DNA, 210 bp, Artificial Sequence
  Synthetic polynucleotide
tagagtgagaggcgggctgacttctggtcatggccgtggcgcgtgagcccatcttctctttcctcagtgcctttgtggtggagcggcagccctgcatgccctgcatgcccatgcatcctgaccggcccctcgtcatcaagaccggcgtccagttcactactaaagtcaggtaggccatgccacttccatttccagtagagattttactga

SEQ ID NO: 10144 - DNA, 205 bp, Artificial Sequence
  Synthetic polynucleotide
tgtgaactttaaaaaatttcaggcctcccgaggagcccagacagctgcagccacagctccccgtatcaagaaatttgccatctatcgatgggacccagacagacaaggctggagacaaacctcatatgcagacttatgaagttgaccttaataagtgagtatctctgtgaaagccagctattgaaggagagttcttgatttgatt

SEQ ID NO: 10145 - DNA, 217 bp, Artificial Sequence
  Synthetic polynucleotide
tttaagtgaggatgtgtgaggcatcccacctcctacaccacaccaacagcatgacctctctctctgtttcaggactcatatccaggctcaaatatccagtggctcaaatatccagtgtctcaacaaaacaagaatgcaccttccactgcaggcctgggatacggtaactccttatttctctggggtagggtggactggccagttgcaaaaactacct

SEQ ID NO: 10146 - DNA, 207 bp, Artificial Sequence
  Synthetic polynucleotide
cgtcatttgctgtggattattaaggtctaccaggtccagaaggtcctccaggtctccctggaaatggaggtattaaaggagagaagggaaatccaggccaaccaacctgggctacctggcttgcctggtttgaaaggagatcaaggaccaccaggactccaggtaggaaatggaagtagatatctgatgagagaagaatgtgggtgt

SEQ ID NO: 10147 - DNA, 209 bp, Artificial Sequence
  Synthetic polynucleotide
taaattctggattccttttaggccaccaccacctatcatgacagatggtgaagatgcggattacactcattttacaaaccagcagagttccacacggcatcacggcatttctcaaaatcagagtcctctcataaaggtaagaagagtatgtatggtcaagtttaggatcttctttttttatataagcctcgtgttgtagtggaaaaatc

SEQ ID NO: 10148 - DNA, 214 bp, Artificial Sequence
  Synthetic polynucleotide
gcaggtgagcacctggggtgttgcctgtaccaggtgaaccccccagacctgatgagctgcctgactagccgcaccctcatcacccgcggggagacggtgtggggagacggtgtccaccccactgagcagggaacaggcactggacgtgcgcgacgccttcgtaaaggtgggctggagggaaggggccgcttgctcgccctaccccttgggaagt

SEQ ID NO: 10149 - DNA, 218 bp, Artificial Sequence; identical to SEQ ID NO: 10062
  Synthetic polynucleotide

SEQ ID NO: 10150 - DNA, 211 bp, Artificial Sequence
  Synthetic polynucleotide
tcatcttactagcctcaaacatatcttctttgccaggactcgcctctgcacaaagccctcttttgggtagctgtggctgtgctgcagcttgatgaggtcagatgaggtcaacttgtattcagcaggtaccgcacttcttgaacaaaacctgcatactttagatagtctccgtatattcaatgacaaggtaagcaaactttgccttgaggtt

SEQ ID NO: 10151 - DNA, 216 bp, Artificial Sequence
  Synthetic polynucleotide
ggttggcagtttctgatgtttttcttcatcttggatattgtaggtgccactcccgggagagccaggcagccatggcgggtcaggaggagacgtctcaggaggagacgtctcaggatgagacctatgaagtgaagatgaaccatgacacggaggcctgcagtgagcccagcctgctctccacagagatgtgagctctgctgccctctgctgaggctg

SEQ ID NO: 10152 - DNA, 210 bp, Artificial Sequence
  Synthetic polynucleotide
gcgccggacgccacttccggtccccgtggtcacgtgaccgtcacttcacgtgaccgcgcggcggccgctgcggcgcgatggcggcggggctggcgcggctggcgcggctcctgttgctcctcgggctctcggccggcggtgagtggcccggccgtccgcgtccccaggccccgcgcgcgctctgcaccccggcctccccgctcacggtct

SEQ ID NO: 10153 - DNA, 212 bp, Artificial Sequence; identical to SEQ ID NO: 9973
  Synthetic polynucleotide

SEQ ID NO: 10154 - DNA, 207 bp, Artificial Sequence
  Synthetic polynucleotide
ggccgggcctacggcttggggcggccgggcccggcggcgggctgtgtccgcggggagcgtccaggctgggccgcaggaccgggcgcggagcctcgcaggggcagggtcgggctcgggctccctaaccgtctccgcttcttccgccagtcggtggccgggctggcggcgcggttgcagcggcagttcgtggtgcgggcctggggctgc

SEQ ID NO: 10155 - DNA, 206 bp, Artificial Sequence
  Synthetic polynucleotide
tatgtcttccacccttgactctcaggatagtgcagcaggatgcagcggaacccccccgatttgccgacaagcccagaccaaactagaagtggccctgtactgtacatgtttctgtggaaccctgacactgaagctgttctggttgccatgtcctgtttccgccacctctgtgaggaagcagatatccggtgtggggtggatgaagt

SEQ ID NO: 10156 - DNA, 216 bp, Artificial Sequence
  Synthetic polynucleotide
gcttattgggtaattctttgggattctctattggagtaggtactacgagactggcagcatccggcctggagtgatagggggctccaagcccaaggtggccaagcccaaggtggccacccccaaggtggtggagaagattggggactacaaacgccagaaccctaccatgtttgcctgggagatccgagaccggctcctggctgagggcgtctgtga

SEQ ID NO: 10157 - DNA, 213 bp, Artificial Sequence
  Synthetic polynucleotide
cttgtatgggtgaccagcccaacctgccctatgtcctggccttcctttatgaagccatgcgcttctccagctttgtgcctgtcactattcctcatgccacccctcatgccaccactgccaacacctctgtcttgggctaccacattcccaaggacactgtggtttttgtcaaccagtggtctgtgaatcatgacccagtgaagtggcctaacc

SEQ ID NO: 10158 - DNA, 205 bp, Artificial Sequence
  Synthetic polynucleotide
ggcatttctgccaccctccctctgctttacaatcaggctctcctccttcagatgagatccgcaccctccgagaccagttgcttttactgcacaaccagttagttactctatgagcgttttaagaggcagcagcatgccctccggaacaggcggctcctccgcaaggtgatcaaagcagcagctctggaggaacataatgctgcca

SEQ ID NO: 10159 - DNA, 214 bp, Artificial Sequence; identical to SEQ ID NO: 9928
  Synthetic polynucleotide

SEQ ID NO: 10160 - DNA, 205 bp, Artificial Sequence
  Synthetic polynucleotide
atggccattttatcctctgactttctgactttggatttgtctctctttccaggtagatgaagagtacaagaatcctcacacagtagaccgagttcctatggatggggaaggtgcctcatctgtggggccaatccttgtacatcctcagctcgctgttggcagaggtaggggcttagtggcctcacagactggaaaccatgtgatt

SEQ ID NO: 10161 - DNA, 206 bp, Artificial Sequence
  Synthetic polynucleotide
ctgcagcttgtccctggccagggggcacccggcaggcctggtgagggcctccagcccccattgccacccctcactgtctgggtgtgctcactctgccaggccagggcctgcggtccaatgtcctcttgtcttttgatgacacccccgagaaggacagcttcagggcccggagtactagtctcaacgagagacccaagaggtacggc

SEQ ID NO: 10162 - DNA, 208 bp, Artificial Sequence
  Synthetic polynucleotide
gcccaagtgactgacatcaactccaagggattggaattgaggaagactgttactacagttgagactcagaacttggaaggcctgcatcatgatggccaatggccaattctgccataagccctgtcctccaggtatgttacacaaaacatccagagattacagtgaaagtcacagttaggagtagcacatagtaatcatgactataata

SEQ ID NO: 10163 - DNA, 209 bp, Artificial Sequence
  Synthetic polynucleotide
ggcagaggaaggcaggagcagaggctaagccgctcatccccagggcaggtgtagacgcagtgctcccccggcccaggcttcctgaactactacgatgcctgctctgctcggagggtctgcgcgccgccagccccgccctgcggctgggaggccccggcgactccttccacaccccaccgcgatccccgctgagctggggcctcctgcgc

SEQ ID NO: 10164 - DNA, 207 bp, Artificial Sequence
  Synthetic polynucleotide
tgggtgccactggggcgaaggcctggccatctcctgaccctcctctcccacctgcagacgtacaacaccaatgcccaggtccctgacagtgccggcaccggcaccgccaccgcctacctgtgtggggtgaaggccaatgagggcaccgtgggggtaagcgcagccactgagcgttcccggtgcaacaccacccaggggaacgaggtc

SEQ ID NO: 10165 - DNA, 213 bp, Artificial Sequence
  Synthetic polynucleotide
cgcggcggccaaagctggcatgaaccgggtattcctgcagcggctcctgtggctcctgcggctgctgttcccccgggtcctgtgccgggagacggggctggagacggggctgctggccctgcactcggccgccttggtgagccgcaccttcctgtcggtgtatgtggcccgcctggacggaaggctggcccgctgcatcgtccgcaaggaccc

SEQ ID NO: 10166 - DNA, 216 bp, Artificial Sequence
  Synthetic polynucleotide
aaggggtgtgggccttttgggcagagcaggaagatctgcctatgacttctgcttaccacttcccaggcctcctgtgtcacctggatgacgcctgtgtcagcgacgcctgtgtcagcaacccctgccacgaggatgctatctgtgacacaaatccggtgaacggccgggccatttgcacctgtcctcccggcttcacgggtggggcatgtgaccagg

SEQ ID NO: 10167 - DNA, 210 bp, Artificial Sequence; identical to SEQ ID NO: 10139
  Synthetic polynucleotide

SEQ ID NO: 10168 - DNA, 208 bp, Artificial Sequence
  Synthetic polynucleotide
tgcttcaaagcttctctcgtcagaagcctggggctcactcatcccgtcaagcctacggggcctccctgtacgagcagctggtgtgggaacgtcagttaggagttaggacttcccctctacctgtgggctaccaaggccctggaggagctggcctgcaagtgaggaggctgagggcccagggcggggaggcagtgggagtagcacactt

SEQ ID NO: 10169 - DNA, 219 bp, Artificial Sequence
  Synthetic polynucleotide
ccctgcccaggagcagagacccagcggggagttaccatctgaacctctccagccacttccgctggtcggcgctgcaggtgtccgtgggcctgtacacgtccgtgggcctgtacacgtccctgtgccagtacttcagcgaggaggacatggtgtggcggacagaggggctgctgcccctggaggagacctcgccccgccaggccgtctgcctcacccgcc

SEQ ID NO: 10170 - DNA, 208 bp, Artificial Sequence
  Synthetic polynucleotide
aatgctgaccaaagacctcatgattcccacagttttcaggcaaagggaatatggaaaaagccagaagaaatgcccacagcctgcccaggccacagtccacagtccacgtagtcaaatggctctcactggaatctctcctcccttggcacaaagtcctccagaggtccctaaacaacagctcttgagttatgagttaggtcaaggtcat

SEQ ID NO: 10171 - DNA, 225 bp, Artificial Sequence
  Synthetic polynucleotide
agggcctgcaggcacgtggcactcagaagacgtttatttattctttcagaggctgaggctgcagtggccacccaggagacatccaccgtcaggctaaaggtcagctccacaggtcagctccacagccgtaaggacacagcacacaaccacccgacctgttcccgacacctcccggctgcctggggccacccctgggctcaccacggtggagatagtgacaatgtc

SEQ ID NO: 10172 - DNA, 225 bp, Artificial Sequence
  Synthetic polynucleotide
ctgggtgggggcgggtggcagggcctcttcctcactcatttcattgtcatctgcattcccccagggcttcagtttccacctggctgcggtcctgctgtccctggcttttatccctggcttttatcacttacgtggagcatggtgagtgcagggcccagcccagccgttggatagaaggttggtgggggggctggagacagcctcccctgaggctaacctgacccc

SEQ ID NO: 10173 - DNA, 205 bp, Artificial Sequence
  Synthetic polynucleotide
gtgacagctttctctgccccctgccaggtgaatgtgatgccctctgccagccgggtgatcctcctggagaacctgacccgcttctggcccatcatccagatagatccgcataaagcgctgccagcaggtggggccagggatgtggggtgtggccctgggtagggggctctgagccccataaacaggcagatcttaagccagagga

SEQ ID NO: 10174 - DNA, 207 bp, Artificial Sequence
  Synthetic polynucleotide
gcaaaactccatctcaaaaaaaagcgggaggggaaataatttgctgtttcttccttcccttcctcagaatgactgatggatactcaggaagtgacctaaccctaacagctttggcaaaagatgcagcactgggtcctatccgaggtaggtatacaagagcttaaaacatttagaactatttattataccaccttagaagtttaagaa

SEQ ID NO: 10175 - DNA, 205 bp, Artificial Sequence
  Synthetic polynucleotide
atctgggctgcgcgcttgcgcttcgcttcctggccctcgtttcctgggacatccctggggctagagcactggacaatggattggcaaggacgcctaccatgcatgggctggctgcactgggagcgcttcatgtgcaaccttgactgccaggaagagccagattcctgcatcaggtatcagatattgggtactcccttccctttgc

SEQ ID NO: 10176 - DNA, 220 bp, Artificial Sequence
  Synthetic polynucleotide
gactcagaccgggactgcttggacggctcagacgaggcctcctgcccggtgctcacctgtggtcccgccagcttccagtgcaacagctccacctgcatccaacagctccacctgcatcccccagctgtgggcctgcgacaacgaccccgactgcgaagatggctcggatgagtggccgcagcgctgtaggggtctttacgtgttccaaggggacagtagc

SEQ ID NO: 10177 - DNA, 213 bp, Artificial Sequence
  Synthetic polynucleotide
ccacgcggtgggggaggcggctagcgtggtggacccgggccgcgtggccctgtggcagccgagccatggtttctaaactgagccagctgcagacggagctgcagacggagctcctggcggccctgctcgagtcagggctgagcaaagaggcactgatccaggcactgggtgagccggggccctacctcctggctggagaaggccccctggaca

SEQ ID NO: 10178 - DNA, 208 bp, Artificial Sequence
  Synthetic polynucleotide
gatgccccggtgagccccaccactctgtatgtggaggacatctcggaaccgccgttgcacgatttctactgcagcaggctactggacctggtcttcctgcttcctgctggatggctcctccaggctgtccgaggctgagtttgaagtgctgaaggcctttgtggtggacatgatggagcggctgcgcatctcccagaagtgggtccgc

SEQ ID NO: 10179 - DNA, 206 bp, Artificial Sequence
  Synthetic polynucleotide
ctcaggtggagatgcggaaagccctgacggacttcattcaagaggaattccagcatctgaagactcaggcagagcagctccacaaccacctccagcctggcctgggagataggccttgcttgctgccttctggattcttggcccgcacagagctggggctgagggatggactgatgcttttagctcaaacgtggcttttagacaga

SEQ ID NO: 10180 - DNA, 206 bp, Artificial Sequence
  Synthetic polynucleotide
gtagttgactaaacagcgtctggtggatgcagatggcatcattaatcccagcgctttctacatctacctgacggcttgggtcagcaacgaccccgtcgcgtcgcgtatgctgcctcccaggccaacatccggccacaccgaccagaatgggtccacgacaaagccgactacatgcctgaaacaaggctgagaagtaagtagcgttt

SEQ ID NO: 10181 - DNA, 206 bp, Artificial Sequence
  Synthetic polynucleotide
cttctagcagcgaggggagggcagatgtcccaggggctggtcactggagcattcctcccctctgactccccagtacaacgccctgctaagcaacatgagcttagcaggatctactccaccgccaaggtctgcctccccaacaagactgccacctgctggtccctggacccaggtacggcccttgcagctcccctctcggcggtgcc

SEQ ID NO: 10182 - DNA, 213 bp, Artificial Sequence
  Synthetic polynucleotide
aggagtgcccccgggagggcaagtctttcaaggcgaagtacaaactggtcaaccacatccgagtgcacacgggcgagaagcccttcccatgccccttcccatgccccttcccgggctgcgggaagatctttgcccgttctgagaacctcaagatccacaagaggacccacacaggtaagggaaaaaagcaggcgggcgtgggttccactggcg

SEQ ID NO: 10183 - DNA, 209 bp, Artificial Sequence
  Synthetic polynucleotide
ctcccgaggcggggactccaggggaccgcggccccagcacccaagtgcttcctttgcccccgcctgccctgcagccccaggagccgtacagcttcagcgagccgagccggcccagcaggccatgaggaaggccctcaccctgcgctacgcactcctcccccacctctacacactgttccaccaggcccacgtcgcgggggagaccgtgg

SEQ ID NO: 10184 - DNA, 220 bp, Artificial Sequence; identical to SEQ ID NO: 9924
  Synthetic polynucleotide

SEQ ID NO: 10185 - DNA, 209 bp, Artificial Sequence; identical to SEQ ID NO: 9947
  Synthetic polynucleotide

SEQ ID NO: 10186 - DNA, 208 bp, Artificial Sequence
  Synthetic polynucleotide
cccttgcagatccagaagcatcgcaagcggttgaaggcggaggagcagtggcagcgacggcagcaggtgttccgccggggcgtgtcaacgcggcgctcggcgctcggcctacgccttctcgcaccagcggggctacgcggacctcatctcctccgggcgcagcatccgcaagaagcgctcgccgcttgatgccatcgtggcggatggc

SEQ ID NO: 10187 - DNA, 221 bp, Artificial Sequence
  Synthetic polynucleotide
tgccggacgccgcgaacctgagcagcgcctggcgcaaccacactgtcccactgcggctgcgggacggccgcgaggtgccccacagctgccgccgctaccggctcgccaccggctcgccaccatcgccaacttctcggcgcttgggctggagccggggcgcgacgtggacctggggcagctggagcaggagagctgtctggatggctgggagttcagtcagg

SEQ ID NO: 10188 - DNA, 209 bp, Artificial Sequence; identical to SEQ ID NO: 10112
  Synthetic polynucleotide

SEQ ID NO: 10189 - DNA, 204 bp, Artificial Sequence
  Synthetic polynucleotide
cgcccaggatactgttacacagctctgacaaacgggcgctgctctaaccagctgccacagtccataaccaaaatgcagtgctgctgtgatgccggccgatgatgctggtctccaggggtcactgtcgcccctgagatgtgtcccatcagagcaaccggtaagagcccttccagttatctgcagaatatcccatcccagccctca

SEQ ID NO: 10190 - DNA, 209 bp, Artificial Sequence; identical to SEQ ID NO: 10070
  Synthetic polynucleotide

SEQ ID NO: 10191 - DNA, 214 bp, Artificial Sequence
  Synthetic polynucleotide
cagccgccgcccacccgacgccaggcctcgctccccgcctggcctgtccgcttcagtgttccatccgcgtctgtctccccgcaggccccggacggtgacggcggacggtgacggtgaaggtggaactgagctgcgcacccggggatctcgatgccgtcctcatcctgcagggtcccccctacgtgtcctggctcatcgacgccaaccacaacat

SEQ ID NO: 10192 - DNA, 210 bp, Artificial Sequence
  Synthetic polynucleotide
ttcttttagaaaaacaatgtggtgagtgtcaacaaggagcctgttgccgagcctgacatcatggccacaaatggcgtggtccatgtcatcaccaatgttcccaatgttctgcagcctccaggtaagtgtcgcatccccactgactctgcagccagtccttttcttcatgtggcagttggtggagagaagaaaaactgttctaaacaatga

SEQ ID NO: 10193 - DNA, 205 bp, Artificial Sequence
  Synthetic polynucleotide
ttttggcccgcttctctctctctctgtctctcggctacagacctgccacctggaactccagatgcttttgcccaactgctgacctgcccctactgcgaccgaccggggctacaagcgcttgacatcactgaaggagcacatcaagtaccgccacgagaagaatgaagagaacttttcctgccctctctgtagctacacgtttgcc

SEQ ID NO: 10194 - DNA, 215 bp, Artificial Sequence; identical to SEQ ID NO: 10059
  Synthetic polynucleotide

SEQ ID NO: 10195 - DNA, 205 bp, Artificial Sequence
  Synthetic polynucleotide
agatggctttcctgctgcagcaaccagtgctaacttatgtttggcaactggtgtacggggcggtgtggactggatgagaaagttggccttccgctacagacagacgggtaaaagagatctacaacacctacaaaaataatgttggaggcaagtgattaccaccagtacctcagcaagttaagacagtccagatacaattccaaaa

SEQ ID NO: 10196 - DNA, 215 bp, Artificial Sequence
  Synthetic polynucleotide
aaaggttctgaaggataccttgcagccacctatccaactgtcggccagaccagtccccgagccaggaaatccatgagcctggacatggggcaaccttctcggggcaaccttctcaggccaacactaagaagttgcttggttagtttatctaaattatgtagattttttttattatttaaaaaaatagatatttttactcttggaaaattatttga

SEQ ID NO: 10197 - DNA, 227 bp, Artificial Sequence; identical to SEQ ID NO: 10051
  Synthetic polynucleotide

SEQ ID NO: 10198 - DNA, 205 bp, Artificial Sequence
  Synthetic polynucleotide
ttcctatgctgaagtatttttttagagccatcttttatctttacttagaacaatgatgttgtggtttgttttattcagatcaagttttcagaagccgactgactactttggcaacgtcctacaaactcgcaagtatttagcacagtctgatttcttctggctaagaaaagccgttccaaaaacagagtgagtattaaacaaaaaa

SEQ ID NO: 10199 - DNA, 209 bp, Artificial Sequence; identical to SEQ ID NO: 10011
  Synthetic polynucleotide

SEQ ID NO: 10200 - DNA, 209 bp, Artificial Sequence
  Synthetic polynucleotide
agtgccatccgttacctggagggccaactggccctgtcgttccgcagccgtctggtggcccacgcctaccgcctctacttctcccagcagacctactaccctactaccgggtcagcaacatggacgggcggcttcgcaaccctgaccagtctctgacggaggacgtggtggcctttgcggcctctgtggcccacctctactccaacctg

SEQ ID NO: 10201 - DNA, 205 bp, Artificial Sequence
  Synthetic polynucleotide
aaaacgcggatgattctaaaacaggatttaggagaccaatgtttatttttcttttagctttgattgctaacccaaggaggaagctggtttgggccataagtaagtgtcaccatgataggtgtcgttctctttgattttgctgccgacttcattgatgggcccatcaaagcctacttatttgatgtctgctcccatcaggacaagg

SEQ ID NO: 10202 - DNA, 206 bp, Artificial Sequence
  Synthetic polynucleotide
ccctttccccatgttaaagcacagaggaccctctttcattacctcccccttccacaggcaccaaattggacagctccggtgtggcctttgctgtggttgggttggggcctgccaggccctgggtctccgggatgtccacctcgccctgtctgaggatcatgcctgggtagtgtttgggcccaatggggagcagacagctgaggtca

SEQ ID NO: 10203 - DNA, 220 bp, Artificial Sequence
  Synthetic polynucleotide
cagcagcggcggcggccgcggcagcggcggcggcggcagcggcagcggcggcagctggaggcctggctgcggctgggggccctggacaaggctgggctccctggacaaggctgggctcccggccccggccccatcacctccatcccggattcgcttgggggtcccttcgccagcgtcctatcttcgctccaaagacccaacggtgccaaagccgccttag

SEQ ID NO: 10204 - DNA, 211 bp, Artificial Sequence
  Synthetic polynucleotide
cattacttccagctgctttttgaagtgtccaccaaaatgaacgactttttcctttcttcacgcagatttcctcctagagtgccaaaatcttttccattcaattccattcaacacctcagtcgtgtacaaaaagactctgtttgtagaattcacggatcaccttttcaacatcgctaagccaaggccaccctggatgggtaatgaaaacaat

SEQ ID NO: 10205 - DNA, 214 bp, Artificial Sequence
  Synthetic polynucleotide
tgttttcaggccaaccatttaaactggatcccaaatctgctcatcgaaaactgaaggtgtcccatgataacttgacagtagaacgtgatgagtcatcatcctgagtcatcatccaagaagagtcacacacctgaacgcttcaccagccaggggagctatggagtagctggaaatgtgtttattgatagtggccggcattattgggaagtggtca

SEQ ID NO: 10206 - DNA, 207 bp, Artificial Sequence
  Synthetic polynucleotide
tcgtgttttcagggtgagcctggtctgcctggatacccagggaaccctggtatcaaaggttctgtgggagatcctggtttgcccggattaccaggaacccctgcctggagcaaaaggacaaccaggccttcctggattcccaggtaaaatttcttctcttaaatgcttccttctttccttccttatctactccaaccagtatcacag

SEQ ID NO: 10207 - DNA, 204 bp, Artificial Sequence
  Synthetic polynucleotide
atgggccagaacggcaacctctactttgccaatgtgctcacctccgacaaccactcagactacatctgccacgcccacttcccaggcaccaggaccatcatcattcagaaggaacccattgacctccgggtcaaggccagtgagtctcagaggctctgcactctctccctgactcctttcaccctcaggcatggcccttcccac

SEQ ID NO: 10208 - DNA, 211 bp, Artificial Sequence
  Synthetic polynucleotide
aggggaggaccccggctgccctgaccctcctgcccctggcttcccacagccacgccgtggcactgacccgagactctgagcggctgctggaggtgcggaagcggaagcggatcaatgtcctgcccctggggaggtgggtgaggctccagtgccccgagggcctggtgggggtggctgctgcatagccttagggattgacagagctgggaag

SEQ ID NO: 10209 - DNA, 214 bp, Artificial Sequence
  Synthetic polynucleotide
caatatccttttgaagaccataacccaccacagctagaacttatcaaacccttttgtgaagatcttgaccaatggctaagtgaagatgacaatcatgttggacaatcatgttgcagcaattcactgtaaagctggaaagggacgaactggtgtaatgatatgtgcatatttattacatcggggcaaatttttaaaggcacaagaggccctagat

SEQ ID NO: 10210 - DNA, 213 bp, Artificial Sequence
  Synthetic polynucleotide
cccgggtgcaccttcatcaacaagcccacgcggcctggctgtgagatgtgctgccgggcgcgccccgaggcctaccaggtccccgcctcataccagcccgacgagggacgaggaggagcgagcgcgcctggcgggcgaggaggaggcgctgcgtcagtaccagcaggtgggcgggaaagtccctggacagacacctgcagaccgcacggggga

SEQ ID NO: 10211 - DNA, 209 bp, Artificial Sequence
  Synthetic polynucleotide
aggagacagaacatacagagcaaaagcgaaatgtgattcgaattattcctcaccacaactacaatgcagctattaataagtacaaccatgacattgccctattgcccttctggaactggacgaacccttagtgctaaacagctacgttacacctatttgcattgctgacaaggaatacacgaacatcttcctcaaatttggatctggct

SEQ ID NO: 10212 - DNA, 215 bp, Artificial Sequence
  Synthetic polynucleotide
gactgcaacaccaacagtactctctagttcccactcacatagggggaagcccagcattttctaccagcagggcttgccagacagtcatctaactgaagaggctttgaggctttgaaagtttcagctgctcctggactagctgaccagacaactggcatgtcaactctaacctctacttcctactcacatagagagaagcctggtactttttacca

SEQ ID NO: 10213 - DNA, 220 bp, Artificial Sequence
  Synthetic polynucleotide
ggtgcctgccaggggggaggctcctaaggcccaccccggtgttttccccgccagctgccttctgccagagcctgggcgccgccgcccccgaggtccgctgccgcccccgaggtccgctgctgtgtggatgccgtgaacttcgtggccgagagcacgagagatcaggaggccaccggcgaggtgggacaggagccagaggcgggtggagcgaggcagaggc

SEQ ID NO: 10214 - DNA, 209 bp, Artificial Sequence
  Synthetic polynucleotide
gaagactcctgtacgagaagcagcagggccgggggcatcgtgaatcaggctccgggatgtgtgtgggatagagagttgggaagtgctctggacgtagtcgccatgccatggaggtaactggaatgatacgcgccgtggtggtcttggtgctgatggtagtctcggtgccggtgggtctggtggtagtggtgctgtgtgtggtggggatg

SEQ ID NO: 10215 - DNA, 204 bp, Artificial Sequence
  Synthetic polynucleotide
aacgaggtgtggacatggccaggcttggtcccgagtggagccaacccatgaagaggctgacacttggcaacaccacctcctccgtgatcctcaccaactactacatggacgtgagtgcttggctcagcccctcgctccctccctgtctcctttccctcatggacctagggctttctttgctgcaagactcaccctttccaagct

SEQ ID NO: 10216 - DNA, 208 bp, Artificial Sequence
  Synthetic polynucleotide
gtacctgggaaaattatgcttactaatgtggttttaatttcatcatgtttcatataggattcacctttatttgatcttattaaacaatcaaaggaccgaggaccgagaaggaccaactgatcaccttgaatctgcttgtcctcttaatcttcctctccagaataatcacactgcagcagatatgtaagcaaaatatatgttatgttga

SEQ ID NO: 10217 - DNA, 205 bp, Artificial Sequence
  Synthetic polynucleotide
tccatcacctggagcaatagacagtaataacagcctgtctgaaatgacacacttcaggccacagctccatcacagtggggacatggtatttacccctgagtgagtcaggcctccaattaagattaaatgagaaactggggacaactgcagcaacagagttgaagaaacttgatttcaaagtttctagtacatcaaataatctgat

SEQ ID NO: 10218 - DNA, 215 bp, Artificial Sequence; identical to SEQ ID NO: 9985
  Synthetic polynucleotide

SEQ ID NO: 10219 - DNA, 229 bp, Artificial Sequence; identical to SEQ ID NO: 9850
  Synthetic polynucleotide

SEQ ID NO: 10220 - DNA, 207 bp, Artificial Sequence
  Synthetic polynucleotide
caaggccaaccgcgagaagatgacccagatcatgtttgagaccttcaacgtgcccgccatgtacgtggccatccaggccgtgctgtccctctacgcctccgcctccggcaggaccaccggtgagtgcccgctgcccccagtcccctctcccgcccccgcccccgcccccgcccccgccgctagcgctgagagcctagcctcggcctc

SEQ ID NO: 10221 - DNA, 205 bp, Artificial Sequence
  Synthetic polynucleotide
cctgtgtctatctggagcccagcttccatctccccactgtcagatcccttgtccacctcctcttcctgcatgcagaggtcctatcccatgacctatactcactcaggcttcaggttatagtcaaggatatgctggctcaacttcctactttgggggcatggactgtggatcatatttgacccctatgcatcaccagcttcccgga

SEQ ID NO: 10222 - DNA, 213 bp, Artificial Sequence
  Synthetic polynucleotide
ttacgtgttccaaggggacagtagcccctgctcggccttcgagttccactgcctaagtggcgagtgcatccactccagctggcgctgtgatggtggccccgactgccgactgcaaggacaaatctgacgaggaaaactgcggtatgggcggggccagggtgggggcggggcgtcctatcacctgtccctgggctcccccaggtgtgggacatg

SEQ ID NO: 10223 - DNA, 219 bp, Artificial Sequence; identical to SEQ ID NO: 10169
  Synthetic polynucleotide

SEQ ID NO: 10224 - DNA, 216 bp, Artificial Sequence
  Synthetic polynucleotide
aagacgctgttcccgctgcgctccatcgacgacgtggtgcgcctgtttgctgccgagctgggccgagaggagccggacctggtgctcctttccttggtgctcctttccttggtgctgggcttcgtggagcattttctggctgtcaaccgcgtcatccctaccaacgttcccgagctcaccttccagcccagccccgcccccgacccgcctggcggc

SEQ ID NO: 10225 - DNA, 207 bp, Artificial Sequence
  Synthetic polynucleotide
ctttgagtttcacctggtgggacctcttgtccttcaggtcctggctgctgtctacaaggccctgaatgaccatcatgtttacctggagggcaccctgctaatgctaaagcccaacatggtgactgctggacatgcctgcaccaagaagtatactccagaacaagtagctatggccaccgtaacagctctccaccgtactgttcctgc

SEQ ID NO: 10226 - DNA, 210 bp, Artificial Sequence
  Synthetic polynucleotide
gcagtggaaactgcttcctgggaatactgatgatgtgccttcccttggactgtgctgcagcgcccatgccctgcagaccatgttccagttaatgactcccatgactcccaagcaaatgtacgagcacttcaaggggtacgagtatgtctcacacatcaactggaacgaggacaaagcggcagccatcctggaggcctggcagaggacata

SEQ ID NO: 10227 - DNA, 207 bp, Artificial Sequence
  Synthetic polynucleotide
tgcacacacacacacgctttttacctgagtggttaaaatgtcactctgagaggatagccctgagcagtcttcagagacgcttgtttcactctcacacccagatagatgctgcttcaccttaaataacaaaaacagaggttcagatgtaaaagcagactataaacgctgcaacttgctgtgtctttttcttctcattggcaggactgg

SEQ ID NO: 10228 - DNA, 206 bp, Artificial Sequence
  Synthetic polynucleotide
acgtaccatctttcccccaggtggtcaagtaccccctgcacgccatcatggagatcaaggagtacctgattgacatggcctccagggcaggcatgcactgcactggctgtccaccatcatccccacgcaccacatcaacgcgctcatcttcttcttcatcgtcagcaacctcaccatcgacttcttcgccttcttcatcccgctgg

SEQ ID NO: 10229 - DNA, 211 bp, Artificial Sequence
  Synthetic polynucleotide
ctggcatcgctcctcagtatacctcctgtcactgtcccttcaggactggagccgggcctcgtctttcttggcttcctcctggtggttgggatggggctggatggggctggctggggccttcctggcccattatgtgaggtgagtagtggaatgaggtaagtaggaagtgagcttgtgccagaaatggaagtctgcagcaaaaacagcaggc

SEQ ID NO: 10230 - DNA, 212 bp, Artificial Sequence
  Synthetic polynucleotide
cacgccatcggaggagccaggcgggccccagatgctgacctcccaggctccgtgtgtagatggcttcgaggagccaggagcacggcagcgggccctcagcgggccctcagcgcagtcagcgtcctcaccagcgcactggaaggtcagcaaccccaggtcatttaagcaccccccacttccgctgcaggtaccctcatctttatcccagcctg

SEQ ID NO: 10231 - DNA, 213 bp, Artificial Sequence
  Synthetic polynucleotide
actgacaagtccccttgtttgtgcccgcagaggatcagcactgccagtggagatgggcgtcactactgctaccctcatttcacctgcgctgtggacactgctgtggacactgagaacatccgccgtgtgttcaacgactgccgtgacatcattcagcgcatgcaccttcgtcagtacgagctgctctaagaagggaacccccaaatttaatta

SEQ ID NO: 10232 - DNA, 209 bp, Artificial Sequence
  Synthetic polynucleotide
tggaaatgagattactcgaggaggctccacctcttatggaaccggatcagagacggaaagccccaggaaccctagcagtgctggaagctggaactctgggactctgggagctctggacctggaagtactggaaaccgaaaccctgggagctctgggactggagggactgcaacctggaaacctgggagctctggacctggaagtactgg

SEQ ID NO: 10233 - DNA, 209 bp, Artificial Sequence
  Synthetic polynucleotide
aggccagaccagaaccagcaagactgaaaccacctgttcattacaatggcccctcaaaagcagggtatgttgactttgaaaatggccagtgggccacagatccacagatgacatcccagatgacttgaatagtatccgcgcagcaccaggtgagtttcgagccatcatggagatgccctccttctacagtcatggcttgccacggtgtt

SEQ ID NO: 10234 - DNA, 213 bp, Artificial Sequence
  Synthetic polynucleotide
ggaggtgggtacggcccagtgggggggagagggacacgccctgggctctgcccagggtgcagccggactgactgagcccctgtgccgcccccagttccgcccccagttccgccacaaagtccgctttgaagggatggagccgctgccctctcgctcctccaggggctccaaggtatccccggatgtgcccccacccagcgctggctccgatgc

SEQ ID NO: 10235 - DNA, 216 bp, Artificial Sequence
  Synthetic polynucleotide
cgctgggaggtgtatcgcaccgccagctgccagcggccggggcgcccagcgcgtgtggccctgcccggcgtggacgtgagccggcctcggctggtgctgcctcggctggtgctgccgcggctggcgctgcctgtggggcactactgctttgtgtttgtcgtgtcatttggggacacgccactgacacagagcatccaggccaatgtgacggtggcc

SEQ ID NO: 10236 - DNA, 225 bp, Artificial Sequence
  Synthetic polynucleotide
acgagcagtcgtccatggggtctgagccgttgctgctacgagtccgcggggtgtagaagtcggggctcccggtgtcgttttccgagcccaggagcttgccctgggactccagcctgggactccaggctggagctccggtgcctaaagtgcagtgcgaggctgtgcagtcgggtggggctgatgtccaccgacctgccgggagacgacccgggttggtctgggggt

SEQ ID NO: 10237 - DNA, 218 bp, Artificial Sequence; identical to SEQ ID NO: 9849
  Synthetic polynucleotide

SEQ ID NO: 10238 - DNA, 205 bp, Artificial Sequence
  Synthetic polynucleotide
attttggttccagaccaacatgatcccgggctcccccggcagtacggagttagagggtggcttcagtcggcaacgcaagcgcaagttgtccttccgcaggcaggcgcacggacaagggtgaggcgggggaggggaggaagggggagggcggggacaaggtgaggctgggagctggaaggcggggtgggccgtgtctgctttaccc

SEQ ID NO: 10239 - DNA, 221 bp, Artificial Sequence
  Synthetic polynucleotide
caggacctggaccagactccagggcgtgcccccccaccccacctgcactccctcacctgttgagctggcgctggagggcatccagcctgctctccacgtcgccccggggccgccccggggccgccgacccgggctggagagggggatgttgaggaggctgggggtgggggcggggcatcgagggagctcctggtactggcggccccgactgtccccccaga

SEQ ID NO: 10240 - DNA, 212 bp, Artificial Sequence; identical to SEQ ID NO: 10230
  Synthetic polynucleotide

SEQ ID NO: 10241 - DNA, 209 bp, Artificial Sequence
  Synthetic polynucleotide
cacgaccacgtgcctctcctctcccgcaggccgcgccaagaccttccgcctgaagctgcccgcgctgctggcgctgacggcccgggagtcgtcggtgcggtggtgcggtcgggcggcgcgggcggcgcgggcgccccgggggccgtggtggtggacgtggacctgacgcccgcggcacccagcagcgagtcgctggccctggacgaagt

SEQ ID NO: 10242 - DNA, 215 bp, Artificial Sequence
  Synthetic polynucleotide
cgactcggaacggcttccgcggccggggcagcgagggccgggggcggcgggcgggatgagtgcggtgtgcggtggagcggcgcggatgctgcggacgccgggacgccgggacgccacggctacgccgccgagttctccccgtacctgccgggccgcctggcctgcgccaccgcgcagcactacggcatcgcgggtgaggcggcgccgcgcagctg

SEQ ID NO: 10243 - DNA, 207 bp, Artificial Sequence
  Synthetic polynucleotide
ctgcccctccctgcccagcccctctcacctttgggacttggggcactttctcccagctcagcggctggggccggggcttctccaggggctccagtggcctcagtcagcaggggcaggggcaggggccagcatgggctctgccttctctggaggggatcagatgggagtcgtggtgcagccactaaccagagacccctccaccctctc

SEQ ID NO: 10244 - DNA, 204 bp, Artificial Sequence
  Synthetic polynucleotide
actgcagcaggctactggacctggtcttcctgctggatggctcctccaggctgtccgaggctgagtttgaagtgctgaaggcctttgtggtggacatgatgatggagcggctgcgcatctcccagaagtgggtccgcgtggccgtggtggagtaccacgacggctcccacgcctacatcgggctcaaggaccggaagcgaccgt

SEQ ID NO: 10245 - DNA, 215 bp, Artificial Sequence
  Synthetic polynucleotide
tgcaactgtttcttcaggcacagacagcacacattgtcctggaagatggaactaagatgaaaggttactcctttggccatccatcctctgttgctggtgaagtggttaagtggtttttaatactggcctgggagggtgagtaatgcttttccaaggctttatttttcctctagtagagaaataactggaagatctcactcatggtggtaagttga

SEQ ID NO: 10246 - DNA, 215 bp, Artificial Sequence
  Synthetic polynucleotide
tgggggcgccactgacgcctgcctggcccgccggacccttcgagaccccggtgctgcacagcctgcagagccgcgccggagccccgctcccggtgccccgctcccggtgccccggggtcccagtgcaggtaagggtcgcgcctcaggttcggggtgcgggtccaaagcgctggggcgcacgggggacgtggagcagctgctccactcgggccctg

SEQ ID NO: 10247 - DNA, 207 bp, Artificial Sequence
  Synthetic polynucleotide
caccccttcgcgcagcgcacgctcaccgcgcgcttccaggtcaacaacacccgcccgccgcacgtgcagctgttgcgcaagccggtgctcacggccatggccatggggctgctggcgctgctgggtgagccggggccgctggggtgggccggccagggccctccaggctggggagcggctcctgcgaaggccccgctgcggggagcg

SEQ ID NO: 10248 - DNA, 205 bp, Artificial Sequence
  Synthetic polynucleotide
acgtgtggtacccctgtctgctcaccatatgcttttgttttaggttctcccatggcgccagccagtgtgggcaattgcagtgtgggcaactgcagcccggacggaggcagtgtggcccaaaactgaacccctggagatggaagtaccccaggcacctatacagcccttctatagctctccagaactgtggatcagctctctccca

SEQ ID NO: 10249 - DNA, 210 bp, Artificial Sequence
  Synthetic polynucleotide
ggacactgctggctccacacaggggcccagcagggagctcgtatgccgctcgtgcctgaagcagacgctgcacaagctggaggccatgatgctcatcctgctcatcctgcaggcagagaccaccgcgggcaccgtgacgcccaccgccatcggagacagcatcctcaacatcacaggtgccgcggcccgtgccccatgccacccgcccgc

SEQ ID NO: 10250 - DNA, 213 bp, Artificial Sequence; identical to SEQ ID NO: 10234
  Synthetic polynucleotide

SEQ ID NO: 10251 - DNA, 216 bp, Artificial Sequence; identical to SEQ ID NO: 10235
  Synthetic polynucleotide

SEQ ID NO: 10252 - DNA, 206 bp, Artificial Sequence
  Synthetic polynucleotide
atttcacacgatcctttgatagtggcagtgtccgcctgcagatctcaaccccagacatcaaggataacatcgttgctcagctgaagcagctgtaccgcatcgcatccttcaaacccaggagagctggcagcccatgcagcccacccccagcatgcaactgccccctgccctgcctccccagtaattgtgaatgccatcttcttcct

SEQ ID NO: 10253 - DNA, 206 bp, Artificial Sequence
  Synthetic polynucleotide
aacgtgtgctacgatcactacttccccatctcccacatccggctatgggccctgcagctgatcttcgtgtccacgccagcgctcctagtggccatgcacgtcacgtggcctaccggagacatgagaagaagaggaagttcatcaagggggagataaagagtgaatttaaggacatcgaggagatcaaaacccagaaggtccgcatc

SEQ ID NO: 10254 - DNA, 212 bp, Artificial Sequence; identical to SEQ ID NO: 10086
  Synthetic polynucleotide

SEQ ID NO: 10255 - DNA, 219 bp, Artificial Sequence
  Synthetic polynucleotide
gagtagagtgtgggttggggggtcccaagggagggtgtgctgagctgcccccaccctgcccccaggtgctgaagggcttccctgagtgcctgcaggctgacgagtgcctgcaggctgacatctgcctgcacctgaaccgctcactgctgcagcactgcaaacccttccgaggggccaccaagggctgccttcgggccctggccatgaagttcaagacca

SEQ ID NO: 10256 - DNA, 205 bp, Artificial Sequence
  Synthetic polynucleotide
taacatttataatctgattctttttcttttgggctactcagttatgctaattaagttcctttatctgcagatatgaaaatgagcagccatttcgaaaggcaggcggcagaagaggaaattaactctctgtataaagtcattgatgaggctaatttgactaaaatggacctggagagtcaaatagaaagtctgaaagaagaacttg

SEQ ID NO: 10257 - DNA, 227 bp, Artificial Sequence
  Synthetic polynucleotide
atagaagactccttcacggctttctttttggcctcggcggcagcggctgccaccacactccccggctttcggccccgtttcttgggaatggcctgagggtcggcctcagcttttcggcctcagcttttcgcttcctgccggggcgtttgatcaccatgacctgggtggatgtggtggccccacccccctcagccttgccccctggcgaagtttgaaaaggcatcttg

SEQ ID NO: 10258 - DNA, 212 bp, Artificial Sequence
  Synthetic polynucleotide
tctctccctgttcccctgcagaaggccgggagtgtgtcaactgtggggccacagccacccctctctggcggcgggacggcaccggccactacctgtgcaatacctgtgcaatgcctgtggcctctaccacaagatgaatgggcagaaccgaccactcatcaagcccaagcgaagactggtaggagcgggcacaggtggctgggagggggctg

SEQ ID NO: 10259 - DNA, 208 bp, Artificial Sequence
  Synthetic polynucleotide
tgttctcggcctgcagagggaggctggcgggtgtgcgctgaactttgggccccgcgggagcagcacggtcaccattccacgggagcggctggcggctggcggctggcgtggagtacaccttcagcctgaccgtgtggaaggccggccgcaaggaggaggccaccaaccagacggtgggtgccgcccgcccctcggccacttgccttgg

SEQ ID NO: 10260 - DNA, 220 bp, Artificial Sequence; identical to SEQ ID NO: 9853
  Synthetic polynucleotide

SEQ ID NO: 10261 - DNA, 217 bp, Artificial Sequence
  Synthetic polynucleotide
gctggctctgcaccgcatcaggactgtgctcatgttccgggacagcaggcagtccagcaatgaggtcaaggtcatccagcaggacaacagatggctgcatccacactgtccacactgcctctgagaaagccacctctagggttttttgtatgttttcaagcctttttccttaatacagaagatatgaaatggtttcagtatcatttcagtgctggga

SEQ ID NO: 10262 - DNA, 208 bp, Artificial Sequence
  Synthetic polynucleotide
actctggaatgttctggaaatttctggaatcttctggtatagctgatgatctcgttcctgccctgactccgcttcttctgccccaggagtgaactggtgtctggtgtgagaggaccaccctgagcaatggcggctgccagtatctgtgcctccctgccccgcagatcaacccccactcgcccaagtttacctgcgcctgcccggacgg

SEQ ID NO: 10263 - DNA, 221 bp, Artificial Sequence; identical to SEQ ID NO: 10239
  Synthetic polynucleotide

SEQ ID NO: 10264 - DNA, 219 bp, Artificial Sequence
  Synthetic polynucleotide
cactgttacctaatttttaggaaattgatgtggaagtgaggaaggagattgaggatgctgcccagtttgccacggccgatcctgagccacctttggaagatgagccacctttggaagagctgggctaccacatctactccagcgacccaccttttgaagttcgtggtgccaatcagtggatcaagtttaagtcagtcagttaaggggaggagaaggaga

SEQ ID NO: 10265 - DNA, 205 bp, Artificial Sequence
  Synthetic polynucleotide
aatgtggttttaatttcatcatgtttcatataggattcacctttatttgatcttattaaacaatcaaaggaccgagaaggaccaactgatcaccttgaatgaatctgcttgtcctcttaatcttcctctccagaataatcacactgcagcagatatgtaagcaaaatatatgttatgttgaccattcaaactgcaaatagatttt

SEQ ID NO: 10266 - DNA, 210 bp, Artificial Sequence
  Synthetic polynucleotide
cgcccgccggggagcccacgcaggaggcctccggggtcgcggcggccaaagctggcatgaaccgggtattcctgcagcggctcctgtggctcctgcggctcctgcggctgctgttcccccgggtcctgtgccgggagacggggctgctggccctgcactcggccgccttggtgagccgcaccttcctgtcggtgtatgtggcccgcctgg

SEQ ID NO: 10267 - DNA, 213 bp, Artificial Sequence
  Synthetic polynucleotide
tgagcaagccgctggctctgcaccgcatcaggactgtgctcatgttccgggacagcaggcagtccagcaatgaggtcaaggtcatccagcaggacaacagatggctgatggctgcatccacactgcctctgagaaagccacctctagggttttttgtatgttttcaagcctttttccttaatacagaagatatgaaatggtttcagtatcatt

SEQ ID NO: 10268 - DNA, 208 bp, Artificial Sequence
  Synthetic polynucleotide
gaaatgttggataaagcataatttgtcaagtctcaactaattaaggtttaattcatgctttgcacaaaaattttgtgtttaggctgctgaaagccttcacccttcacaagaccattgttaagaggcgaatgtcccatgtgagtggaggaggatccatagatttgtctgacacagactccctacaggaatggatcaacatgactggctt

SEQ ID NO: 10269 - DNA, 214 bp, Artificial Sequence
  Synthetic polynucleotide
ggggacagtagcccctgctcggccttcgagttccactgcctaagtggcgagtgcatccactccagctggcgctgtgatggtggccccgactgcaaggacagactgcaaggacaaatctgacgaggaaaactgcggtatgggcggggccagggtgggggcggggcgtcctatcacctgtccctgggctcccccaggtgtgggacatgcagtgatt

SEQ ID NO: 10270 - DNA, 218 bp, Artificial Sequence
  Synthetic polynucleotide
cccaggccaggaggcccctggggggccagagatgggtaaggggaggtactggcctcaggccaaaggtgctgccgcctccgcagggaacaccagctggctgggaacaccagctggctgatgagcctggagaacccgctcagccctttctcctcggacatcaacaacatgcccctgcaggagctgtctaacgccctcatggcggctgagcgcttcaagga

SEQ ID NO: 10271 - DNA, 209 bp, Artificial Sequence
  Synthetic polynucleotide
tgggcgtgcgccgcacggacaagggcgacctgagcctacgctgcgatgagctggtgcgcacccaccacatcctcattgacctgcgccaccgccccaccgccccaccgccggcgccttcaaccactcagacctggacgccgagctgaggcggctcttccgcgagcgctatcggctgcaccccaagttcgtggcggccgtgcactacgagc

SEQ ID NO: 10272 - DNA, 205 bp, Artificial Sequence
  Synthetic polynucleotide
ttaaacaatcttttaaaatgtcattttagcttatactgcaaaaggaacttcatgtagtctatgctttatcacatgtatgtggacaagaccgaacactacttactggccagcatcctactgaggatttttcttcacgaaaagcttgaatcgttgttgttatgcacactaaatgacagagaaataagcatggaaggtatggtatggc

SEQ ID NO: 10273 - DNA, 208 bp, Artificial Sequence
  Synthetic polynucleotide
gctcatctgtttattttctgtccactacagaggcaccaagtctgaaggaggcagaagggaaagaacctgagctcttcctaagtagatccaggcctgtggcatgtggcagccaaggccaagcaggcccatctcacaaccctgaagcacatacaagcaccctggtggaagaagcttggagaagaatctggagatgagattgatgttccaa

SEQ ID NO: 10274 - DNA, 214 bp, Artificial Sequence; identical to SEQ ID NO: 10148
  Synthetic polynucleotide

SEQ ID NO: 10275 - DNA, 205 bp, Artificial Sequence
  Synthetic polynucleotide
ccttctctgcctcctccagctcagcccagcttctgtctcggtaccgacctcgggcagcagtcattgctgtcacccgctctgcccaggctgcccgccaggtcggtccacttatgccgaggagtcttccccttgctttaccgtgaacctccagaagccatctgggcagatgatgtagatcgccgggtgcaatttggcattgaaagtg

SEQ ID NO: 10276 - DNA, 210 bp, Artificial Sequence
  Synthetic polynucleotide
gagtcacccaacctttctgcacacaggcttcatcgcctcagacatgacctcccgcaactcgagcacgcagctgtggctcatcacgcactaccacgagcaccacgagcacggctccctctacgactttctgcagagacagacgctggagccccatctggctctgaggctagctgtgtccgcggcatgcggcctggcgcacctgcacgtgga

SEQ ID NO: 10277 - DNA, 207 bp, Artificial Sequence
  Synthetic polynucleotide
gaaggaggcctgtacctggctgtgaccctgttggcaggcatcactggagttgtcatcacgctgtgcctcatattaattatcacttcctccaccaaaaccaaaaccatccggaggtcttactttgaagtcttttggtacacacatcatctctttgtgatcttcttcattggccttgccatccatggagctgagtgagtgtttaaattc

SEQ ID NO: 10278 - DNA, 215 bp, Artificial Sequence
  Synthetic polynucleotide
tcggggccgccagtaccaggagctccctcgatgccccgcccccacccccagcctcctcaacatccccctctccagcccgggtcggcggccccggggcgacggccccggggcgacgtggagagcaggctggatgccctccagcgccagctcaacaggtgagggagtgcaggtggggtgggggggcacgccctggagtctggtccaggtcctggcgg

SEQ ID NO: 10279 - DNA, 206 bp, Artificial Sequence
  Synthetic polynucleotide
caagagcaagttcggcagcggctactccctgcgggccaaggtgcagagtgaagggcaacaggaggcgctggaggagttcaaggccttcgtggacctgacctgacctttccaggtgtgtgccggccccggcagcccccactgggtgggccctgggcccctacctaggcctctcccatctgctgtgcggagcgtctgtgcctcgcccc

SEQ ID NO: 10280 - DNA, 213 bp, Artificial Sequence
  Synthetic polynucleotide
aggagactattacgttcctctataaattcattaagggagcttgtcctaaaagctatggctttaatgcagcaaggcttgctaatctcccagaggaagttatagaggaagttattcaaaagggacatagaaaagcaagagaatttgagaagatgaatcagtcactacgattatttcggtaactaactaactataatggaattataactaactgac

SEQ ID NO: 10281 - DNA, 206 bp, Artificial Sequence
  Synthetic polynucleotide
atccaaagtgcagagtctccacttgtggaacaatggtaggaatcatttaatttttaatttatattccggcacttggcctgactacaccgaggacgtggggtggggtttgacatcggccaggcgatgctggccaaagccagcatcagtactgaaaacttccgacccaactttgatgtttctattcccctcttttctaaggatcatcc

SEQ ID NO: 10282 - DNA, 208 bp, Artificial Sequence
  Synthetic polynucleotide
ctcttcccgattgcagatgtggatccagctgttgtacagtgcctgcttctggtggctgttttgctatgcagtggatgcttatctggtgatccggagatcggagatcggcaggactgaggtattcaccgaggaaatgggatttctgccctagttctattttagagggaagataagagatggcactgagcgtttaaaagtattttgcagt

SEQ ID NO: 10283 - DNA, 212 bp, Artificial Sequence
  Synthetic polynucleotide
gtgaactcgtacaatggcctgggaggcccgccggccgcacccccgcctccgccgcacccccacccgcatccgcacgcacaccatctgcacgcggccgccgcgcggccgccgcaccgccgcctgccccaccgcaccacggggccgccgcgccgccgccgggccagctcagccctgccagcccagccaccgccgcgcccccggcgcccgcgccc

SEQ ID NO: 10284 - DNA, 205 bp, Artificial Sequence
  Synthetic polynucleotide
cctgctttgtagacatctcatcccaaagcttgaaattgtctttttttttctttcccaaaagtaccagaataggagttttcctctgtggacctgaagccttccttggctgaaaccctgagtaaacaaagcatctccaactctgagtctggccctcggggagtgcatttcattttcaacaaggaaaacttctaacttgtctcttcca

SEQ ID NO: 10285 - DNA, 209 bp, Artificial Sequence
  Synthetic polynucleotide
ggatgtcctcatgctccctggtgacctcgttggcttgcagcacgacgctggccctggcgccctcctgcactgctcgccggctcccggccaccctggtcccctggtccccgggccccgtacctctccgccaacgcctcgtcatggctgccccacttgccagcccagctggagggcacttgggcctgccctgcctgtgccctgcggctgct

SEQ ID NO: 10286 - DNA, 206 bp, Artificial Sequence
  Synthetic polynucleotide
tagtgacagccgcttcttgctgggcagctggctagagcaggcccgagcagcggcagtcagtgaggccgaggccgatttctacgagcagaacagccgctacgctaccagctgaccttgtgggggccagaaggcaacatcctggactatgccaacaagcagctggcggggttggtggccaactactacacccctcgctggcggctttt

SEQ ID NO: 10287 - DNA, 208 bp, Artificial Sequence; identical to SEQ ID NO: 10125
  Synthetic polynucleotide

SEQ ID NO: 10288 - DNA, 211 bp, Artificial Sequence
  Synthetic polynucleotide
agttcacccatgcagggcagggagggctgattgaagagcccacaggtgatgagctaccaaccaagaaggggcggaggaaccgtttcaagtggggcccagcggggcccagcatcccagcagatcctgttccaggcctatgagaggcagaagaaccctagcaaggaggagcgagagacgctagtggaggagtgcaataggtacaacggcgggc

SEQ ID NO: 10289 - DNA, 208 bp, Artificial Sequence
  Synthetic polynucleotide
gcacagcctcaaccccgacgcctcgggctccagctgcagcctggcccggacgcgctcccgagaaagctgcgccagcgtgcgccgcgcctcgtcggccgacggccgacgacatcgaggccatgcgcgccggggtgctgcccccgccaccgcgccacgccagcaccggtgagggcgccgcgggacccgttccgccccagcccacgcttct

SEQ ID NO: 10290 - DNA, 206 bp, Artificial Sequence
  Synthetic polynucleotide
ccctgtggctgtcaggcctgagggtcgggtggggcgtggggaaagtccctgactcggctggatctccctgtggcagggttgcttcacccacaccgtcatgtcatgtactacggccactacagtaacgccacgctgaaccagccgtgtggcagccccctggatggcagccagtgcacacccagggtgggtggcctgccctacaacat

SEQ ID NO: 10291 - DNA, 206 bp, Artificial Sequence; identical to SEQ ID NO: 10161
  Synthetic polynucleotide

SEQ ID NO: 10292 - DNA, 219 bp, Artificial Sequence
  Synthetic polynucleotide
tctccttcacttactgctgtggactctccttaggggaatgtcgggtgcttcttcctcaagcagctcagcactttgtaggagagcatggatctctgggtgcagatcctcccagatcctccatactagcttcccctgaggccagtgctctgcagtgcaataccaaggcgacatctggattataaaaatgaaaataccggcatactctacttgcttcatgca

SEQ ID NO: 10293 - DNA, 208 bp, Artificial Sequence
  Synthetic polynucleotide
tgggatgatctacagcttgcctggcctgaaaatgtatgagcaagagtgggtgaggttacacctgctgaacataggcggctcccaagacattcacgtggttcgtggttcactttcacggccagaccttgctggaaaatggcaataaacagcaccagttaggggtctggccccttctgcctggtaaagattgggtaatgggaagaggtcc

SEQ ID NO: 10294 - DNA, 211 bp, Artificial Sequence
  Synthetic polynucleotide
gcctcttgactcctactgtcctccctcctcccacaggatgtcctctagggttttatggaaaagattgtgcactgatatgccaatgtcaaaacggagctgaacggagctgactgcgaccacatttctgggcagtgtacttgccgcactggattcatgggacggcactgtgagcagagtaagtatgagagtgtggcatcactgggtggtattt

SEQ ID NO: 10295 - DNA, 207 bp, Artificial Sequence
  Synthetic polynucleotide
ccaccattcagggagcctgggaggtgcctttcgcacccagacccccgtgggctctctcctgatggctcctgcccttttcccttccctcctcagcccccagccccagtgcctggtgctcacggggccccccaacttccgcccggccctggtggactttgtgggcaccttcacccggaacctcagcctgatgatctgtggccacgtgct

SEQ ID NO: 10296 - DNA, 207 bp, Artificial Sequence
  Synthetic polynucleotide
ccaccacggcatccggccctgcgtcatctcgcgccagctgcgcgtgtcccacggctgcgtctccaagatcctgtgcaggtaccaggagactggctccatacccatacgtcctggtgccatcggcggcagcaagcccaaggtgagcgggcgggccttgccctcctggctcccagactgtggtcccctgtgttggggaagaccgggcgg

SEQ ID NO: 10297 - DNA, 205 bp, Artificial Sequence
  Synthetic polynucleotide
ttctccctccccacccttggtgcagaggaggctggcagctgtgtgcaggatgggcagaggtataatgataaggatgtgtggaagccggagccctgccggatggatctgtgtctgtgacactgggactgtcctctgcgacgacataatctgtgaagacgtgaaagactgcctcagccctgagatccccttcggagagtgctgcccc

SEQ ID NO: 10298 - DNA, 205 bp, Artificial Sequence
  Synthetic polynucleotide
agctaagagggaagcctggctgcagttgagggccgaaattgaagccctgaccgactcctggttgacactggccctgaaagcactctcgctcattcactccctcccggtgaggctctctgcggggtctttgccaggaaatgggcaatgctcgtgcttgttcattttggagatttatttttcaacagtctttgttttctttttgttc

SEQ ID NO: 10299 - DNA, 211 bp, Artificial Sequence
  Synthetic polynucleotide
gtaggcacgtgctagggggggccctggggcgccccctcccgggcactccctgagggctgcacggcaccgccacaggcactgcacccgttcgcggcggacggcggcggacgacacctgccggaccagccagggctccccggctttccagccgcccgagattgccaacggcctggacaccttctccggcttcaaggtggacatctggtcggct

SEQ ID NO: 10300 - DNA, 206 bp, Artificial Sequence
  Synthetic polynucleotide
ggcccctgctggctcgtggcgcggggcggctgcggagggccccgcgcctggtcccagtgcggcggcggagggctccgagcctggtcccagcgcagcgcagcgcagccggacgcgtctgccggccccctggcccggctggcacggagcagagccgcgggctggggcacggctcgacgtcgagaggcggcccctgggtggggacaggg

SEQ ID NO: 10301 - DNA, 207 bp, Artificial Sequence
  Synthetic polynucleotide
cggaaaaatctattatagccccagcattctccaacttcaaagtcagatgcaaattctcgaatgatattttttgtaggatcattacaggactggtgaaccatctatctctacacgatattcatatctaaaattgaaaaacagaccattactatacagttagtaaagtaagaataaaaaacaaactcatctaaacattaaggtcactaa

SEQ ID NO: 10302 - DNA, 225 bp, Artificial Sequence; identical to SEQ ID NO: 10172
  Synthetic polynucleotide

SEQ ID NO: 10303 - DNA, 205 bp, Artificial Sequence
  Synthetic polynucleotide
ctgggaagatgagatgaggatcccatgccctaatcgccaattctgacccattcctcgatgtctatagacctgatcgtgggagcttacggggccaaccaggtaggtggctgtgtacaggtgagcactggctccaggggcgggatggggaaggtcctgtgccatcaagaggaggccaggccaggaggagccacaatggcaagcctac

SEQ ID NO: 10304 - DNA, 210 bp, Artificial Sequence
  Synthetic polynucleotide
acttggggatggtggaggagtggggaggggtatcttgggcctagctaagttgtgtttttctttttcatttcacagggtccttctggtcctgttggtcctgttggtcctgctggtgctgttggcccaagaggtcctagtgtatgtacatgctgaagatttctttgcaacactaacatttagagagaatcagtccaaaacatctgttaagaa

SEQ ID NO: 10305 - DNA, 208 bp, Artificial Sequence
  Synthetic polynucleotide
gcaagagctccctgttccggatcctgggtgggctctggcccacgtacggtggtgtgctctacaagcccccaccccagcgcatgttctacatcccgcagagcgcagaggtaaggaagcccgtgcgcctctcctccacctcttcctgcctgtgcgctcacacatggcttcctgcagaggcccaggaagtggtgaagagtcagcacctcag

SEQ ID NO: 10306 - DNA, 214 bp, Artificial Sequence
  Synthetic polynucleotide
gcgcagcggccgctgccgccgccgccgccgccgccgccgccgctgggggcctggcgctggggctgcaccctgggggcgcgcagggcggcgcgggcctcccgcgcgggcctcccggcgcaggcggcgctctacggccacccggtctacggctactccgcggcggcggcggcggctgcgctggcgggccagcacccggcgctctcctactcgtacc

SEQ ID NO: 10307 - DNA, 205 bp, Artificial Sequence
  Synthetic polynucleotide
cagggctgctgagggaagggactgaggtgcgcgtgtctctgcagcccaggggtcactgtccttctgcatgctggaagccagccaggacatgggccgcacgcacgctcgagtggcggccgcgtactccagccttggtccggggctgccacttggaaggcgtggccggccacaaggaggcgcacatcctgagggtcctgccgggcca

SEQ ID NO: 10308 - DNA, 210 bp, Artificial Sequence
  Synthetic polynucleotide
cggagaccgacgaggacgagggcgcgggcgcggcggaggcgggcgcggaaggcgcggaggagggcgcggcggggctcgagggcacggcggccacggcggccacggcggcggcgggggcgacggcgcgggttgtggcggccgcaggccgggccctgcgaggcctcagctaccgcagcctgcggcggcgcgtgcggcggctgcggcggctta

SEQ ID NO: 10309 - DNA, 220 bp, Artificial Sequence
  Synthetic polynucleotide
agccaccaggcgtggctctgcccacggtctcaccacctggtgtggatgccaaagcccaggtgaagacagagaccgcggggccccaggggcccccacactacgctggggcccccacactacaccgaccagccatccacctcacagatcgcctacacctccctcagcctgccccactatggctcagccttcccctccatctcccgcccccagtttgactact

SEQ ID NO: 10310 - DNA, 206 bp, Artificial Sequence
  Synthetic polynucleotide
cgagcccttggggcgcactcgctcagctgtcttcggttctctctgcaggtgagcagcagtactcggtgccgcccccggtctatggctgccacacccccaccccaccgacagctgcaccggcagccaggctttgctgctgaggacgccctacagcaggtaggaaggcgctgggctctgcgtctgggtccttgggaccccggagggga

SEQ ID NO: 10311 - DNA, 205 bp, Artificial Sequence
  Synthetic polynucleotide
gccaaaggcaaagtggccaacactaatgtgaccttgcaggcactacggggcaccaaggtggcggtgaatcagcggagcgcggatgcactccctgcccccgtccgtgcctggtgccaacagcatcccgtgggtcctcgagcagatcttgtgtctgcagcagcagcagctacagcagatccagctcaccgagcagatccgcatccag

SEQ ID NO: 10312 - DNA, 212 bp, Artificial Sequence
  Synthetic polynucleotide
aggcggaggccccctcttccccaggcctgcgtagatatccctcagctgctggaggaggcggtgggggcgggggctccgggcagtgctggcggcgtcctggcggcgtcctggctgccctgctggaccatgtcaggagcgggtcttgcttccacgccttgccgagccctcagtacttcgtggactttgtgttccagcagcacagcagcgaggtc

SEQ ID NO: 10313 - DNA, 205 bp, Artificial Sequence
  Synthetic polynucleotide
tacagcctaggcagcatctacactcgcctgtatgggcagtcccctccagactcgcacacggctgagggtgatgtcctggccctgctcagcatctgtcagtcagtggagaccacaggccctgctgcggtgggtggatgctcacgccaggcctttcggcaccatcaggcccatgtatggggtcacagcctctgctaggaccaagcca

SEQ ID NO: 10314 - DNA, 215 bp, Artificial Sequence; identical to SEQ ID NO: 10278
  Synthetic polynucleotide

SEQ ID NO: 10315 - DNA, 207 bp, Artificial Sequence
  Synthetic polynucleotide
ctggagccaccaccagagcttctggcactggaaatggagctgccagaactgctggagccactgtagctactgaaaccgctggagtcacccttcccagtgaggcaggcaggggtcgttaggggaggtgatacgcgtggggtccttacaagggtctgagaaggtgccaatgctcttagccaaggtccctgtggaggaaagcagtggtta

SEQ ID NO: 10316 - DNA, 207 bp, Artificial Sequence
  Synthetic polynucleotide
cactggggagaggctccccgcagcccactctgactgtgccctctgccctgcaggagagtatgacctgcggcgctgggagaagtgggagctggacctggacctggacatcaaggaggtcttcgtccaccccaactacagcaagagcaccaccgacaatgacatcgcactgctgcacctggcccagcccgccaccctctcgcagaccat

SEQ ID NO: 10317 - DNA, 205 bp, Artificial Sequence
  Synthetic polynucleotide
atctgcttatgaccaggagccactcaagcagcactctcccttcacaggtggtattccaaacacatgactcggagtcaggctgagcaactgctaaagcaagaaagaggtaagtgtggaaccactagcacacagcattctccttgcataagtgaggatcttgaactgagggcctgttctgccccctacctttgggcaaggcagtgtc

SEQ ID NO: 10318 - DNA, 206 bp, Artificial Sequence
  Synthetic polynucleotide
gccggacaggcagccccggtgagggagcccacgtgtcagcagctgtggccaagactgtgaggatgacgctagtgattgtggtcgtctatgtgctgtgctgtgctgggcacccttcttcctggtgcagctgtgggccgcgtgggacccggaggcacctctggaaggtgggtgtagccgtggctagggctgacggggccacttgggct

SEQ ID NO: 10319 - DNA, 218 bp, Artificial Sequence; identical to SEQ ID NO: 9878
  Synthetic polynucleotide

SEQ ID NO: 10320 - DNA, 205 bp, Artificial Sequence
  Synthetic polynucleotide
ggagctgggaccacagtggctgagcttccggtgtgtcttccaggagaccctgtgaagccgtctcggggcccgctggtgacctgcacgtgtgagagcccacccacattgcaaggggcctacctgccggggggcctggtgcacagtagtgctggtgcgggaggaggggaggcacccccaggaacatcggggctgcgggaacttgcac

SEQ ID NO: 10321 - DNA, 212 bp, Artificial Sequence; identical to SEQ ID NO: 9951
  Synthetic polynucleotide

SEQ ID NO: 10322 - DNA, 218 bp, Artificial Sequence
  Synthetic polynucleotide
attcttacggcctgatgttcgacctgcctctccccagagtcctgcctctgccccctggagatgaatgtggcccaggaattccagctccgacgacggcagctctccgacgacggcagctggggagccaaggaagttcctggagcaagtggagcagccccgtgtgcgttccccctggtaagatcactctgagtacaggaacaggggcaagcattagaaat

SEQ ID NO: 10323 - DNA, 207 bp, Artificial Sequence
  Synthetic polynucleotide
agaggctctgagaagaagaccagcggccccctttctcctcccacagggcctcctggcccggcgcctgcaggccccgccgtgcggctggggtccgtgccctacttactccctgctcttccgcgtcctgctgcagtgcttgaagcaggtgagtggggccgggcagggaccatccgtcccacgttgggccaggaggacagggagctgcca

SEQ ID NO: 10324 - DNA, 207 bp, Artificial Sequence
  Synthetic polynucleotide
tgtctattttgcttcttttagatgtaacatgtaacattaagaatggcagatgcgagcagttttgtaaaaatagtgctgataacaaggtggtttgctcctgctcctgtactgagggatatcgacttgcagaaaaccagaagtcctgtgaaccagcaggtcataatctgaataagattttttaaagaaaatctgtatctgaaacttcag

SEQ ID NO: 10325 - DNA, 205 bp, Artificial Sequence
  Synthetic polynucleotide
gctgccctctcgctcctccaggggctccaaggtatccccggatgtgcccccacccagcgctggctccgatgcctcgcacccctccacctcctccagccagccagctggatgggctgagcgtgagcctgggccggctggggacaaggtgtgagcctgagccctcccgcctccaagccgtgttcgaggccctgctcacccagtttga

SEQ ID NO: 10326 - DNA, 209 bp, Artificial Sequence
  Synthetic polynucleotide
ggtaagcagtggccccgaacctacccccaaacccgggctcgctcccgggaggcggggcccgctctcactggctctccctccagccggcggccagaaatgcagaaatgcacggtctccatcaacgtcctgctcgcccagaccgtcttcttgttcctcattgcccagaaaatcccagagacttctctgagcgtgccgctcctgggcaggtg

SEQ ID NO: 10327 - DNA, 210 bp, Artificial Sequence
  Synthetic polynucleotide
ggaccccatgttactgaagtggaagggaccagtttcttaactggaattattagctggggtgaagagtgtgcaatgaaaggcaaatatggaatatataccatatataccaaggtatcccggtatgtcaactggattaaggaaaaaacaaagctcacttaatgaaagatggatttccaaggttaattcattggaattgaaaattaacagggc

SEQ ID NO: 10328 - DNA, 215 bp, Artificial Sequence; identical to SEQ ID NO: 10013
  Synthetic polynucleotide

SEQ ID NO: 10329 - DNA, 205 bp, Artificial Sequence
  Synthetic polynucleotide
aatcagatttggacaccctggctaaagaagcatccatcccaattatcaatgggctgtcagatttgtaccatcctatccagatcctggctgattacctcactcacgctccaggttggtttatttatttgtcttacaaaagagcaaaatcaaataattcctgacttgctttaagtgaaacagtttacttaaatcatggtattggtgt

SEQ ID NO: 10330 - DNA, 205 bp, Artificial Sequence
  Synthetic polynucleotide
ttttcatttcctcattggaagaagaagcatagtatagaagaaaggcaaacacaacacattcaacctctgccaccatggggaactgggctgtgaatgagggaggggctctccatttttgtcattgtaagtaccaacaagagataagttataaattctctgacttctcggggttatcttggaactaaaatagaccaaagcttttttg

SEQ ID NO: 10331 - DNA, 219 bp, Artificial Sequence
  Synthetic polynucleotide
cgcagagctccaagagggcgcgcgccagaagctgcacgagctgcaagagaagctgagcccactgggcgaggagatgcgcgaccgcgcgcgcgcccatgtgggcgcgcgcgcccatgtggacgcgctgcgcacgcatctggccccctacagcgacgagctgcgccagcgcttggccgcgcgccttgaggctctcaaggagaacggcggcgccagactggc

SEQ ID NO: 10332 - DNA, 217 bp, Artificial Sequence
  Synthetic polynucleotide
tagaaaggctggggtgttgggctcatggattgggtcatgtgggcccattttaccttttgaagtattgctcccccagtggattgggtggctccattcactccaatgctgccaatgctgagcacttccacagagtgggttaaagcggctccgaacacgaaacgtgtagcgtttctgcccatccacactaggcaaggagaacttatgtctataatccact

SEQ ID NO: 10333 - DNA, 208 bp, Artificial Sequence
  Synthetic polynucleotide
gtgtttgtgacactcttgtgaccgtgccaagaaaacgtaagcaaatatcaagcctccaaatcctaatgcaacaagtcctgaatcccttgcaggtatgtcctatgtcctggatgatgaatacacaagctcagtaggctccaaatttccagtccggtggtccccaccggaagtcctgatgtatagcaagttcagcagcaaatctgacatt

SEQ ID NO: 10334 - DNA, 210 bp, Artificial Sequence
  Synthetic polynucleotide
ggaactcttacacgtgtaggagccaaacatgagagacacatatttctctttgatggcttaatgatttgctgtaaatcaaatcatgggcagccaagacttccaagacttcctggtgctagcaatgcagaatatcgtcttaaagaaaagttttttatgcgaaaggtacaaattaatgataaagatgacaccaatgaatacaagcatgctttt

SEQ ID NO: 10335 - DNA, 205 bp, Artificial Sequence
  Synthetic polynucleotide
tcaagcacttagcaagcccctggcacttgataaagcttagtaaatatagctaattgtggtgacactcttcttcaatttatcaaggcaccaaaaacccctccctctgcagaagagcatggacctcttaggaaaacaactttccttttactcctttggtataataggtaagagaagagtgagtatgtatatatttttatttgagttt

SEQ ID NO: 10336 - DNA, 213 bp, Artificial Sequence
  Synthetic polynucleotide
caataccgccaggtggccagcccgcggaccgacccctactcggcggcgcaactccacaaccagtacggccccatgaatatgaacatgggtatgaacatgggtatgaacatggcagcagccgcggcccaccaccaccaccaccaccaccaccaccccggtgcctttttccgctatatgcggcagcagtgcatcaagcaggagctaatctgcaag

SEQ ID NO: 10337 - DNA, 206 bp, Artificial Sequence
  Synthetic polynucleotide
gcaaaatagcccagtataagcgggagtgcccgtccatctttgcttgggaaatccgagacagattactgtccgagggggtctgtaccaacgataacataccataccaagcgtaagttcattgagaacatctgccctccctgccctaagcccaatgctctctcctctttacctcctcccaccctctctctccactgtctcttagtctg

SEQ ID NO: 10338 - DNA, 212 bp, Artificial Sequence
  Synthetic polynucleotide
gtagctgttgtttttaactttttattccaaaatacggctgttccaaaaaatcttgaccttgatattttttcttctagtccttcttggaatggccttggaatggccttggaagcatccctagcacagatatctacaaaagtaccaagaattacaaaaacgtaagtacctttgtgagacatttgctggacttgggtttactagcctgaagtttc

SEQ ID NO: 10339 - DNA, 207 bp, Artificial Sequence; identical to SEQ ID NO: 10315
  Synthetic polynucleotide

SEQ ID NO: 10340 - DNA, 207 bp, Artificial Sequence
  Synthetic polynucleotide
ccttcactactctgctaccagataaataacaggagatttaacaatcatcacatggaaaaccattccctgaataacacagccttctctgtctctcttggcagtcagtcggtcttggcagctgttgtaattgccaacctgaaagggatgtttatgcagctgtgtgacattcctcgtctgtggagacagaataagattgatgctgtaagt

SEQ ID NO: 10341 - DNA, 210 bp, Artificial Sequence; identical to SEQ ID NO: 10152
  Synthetic polynucleotide

SEQ ID NO: 10342 - DNA, 209 bp, Artificial Sequence
  Synthetic polynucleotide
aacaccgagctcaggttggaatgatctaaggacacaaaagcatggggcctcggggctggggcggtgcgactaccggaggcgcaagttgcgcacggggtcccgggccgggagcgatacactgcctccccggtgtcagtgctccagacggtctccgccatgacagctgcgacgcgccgcgactgcgccggaaagcgcgccgctctgttttc

SEQ ID NO: 10343 - DNA, 214 bp, Artificial Sequence; identical to SEQ ID NO: 10148
  Synthetic polynucleotide

SEQ ID NO: 10344 - DNA, 205 bp, Artificial Sequence
  Synthetic polynucleotide
cagtcctgtcatccagctgcagcccaccttcacacccatgcgggtcgcactggctggcacattccactactacagctgcgagagagccaaaaaggccatgcatgggctaccagccactagtgaccatggatgatgctatggagaggaccgtgcagagctttcgccacctgcggagggtcaagtgagggacactggaggctgggct

SEQ ID NO: 10345 - DNA, 225 bp, Artificial Sequence; identical to SEQ ID NO: 10236
  Synthetic polynucleotide

SEQ ID NO: 10346 - DNA, 205 bp, Artificial Sequence
  Synthetic polynucleotide
atgtggaggatgaggtgggaggagggacggcagccctgcttctcttctgcccagcttcaaggagcggttccatgccagcgtgcgcaggctgacgcccagctagctgcgagatcaccttcatcgagtcggaggagggcagtggccggggcgcggccctggtctcggcggtggcctgtaagaaggcctgtatgctgggccagtgaga

SEQ ID NO: 10347 - DNA, 210 bp, Artificial Sequence; identical to SEQ ID NO: 10143
  Synthetic polynucleotide

SEQ ID NO: 10348 - DNA, 208 bp, Artificial Sequence
  Synthetic polynucleotide
aagtgccgttaggccaagcaggtgctaaaagcccggggtcgtggaccccggccaggtcttagcagcatggaggcgcagggtgtagcggagggcgcggggcgcggggccgggcgccgccagcggcgtgccccaccccgcggccctagccccggctgcggctcccaccttggcgccagcctcggtggcggccgcggcctctcaattcacc

SEQ ID NO: 10349 - DNA, 209 bp, Artificial Sequence
  Synthetic polynucleotide
gtgttcattgcaggaagagtaaataaaggtggtattttgattagaagtgccagaggaattttcttctggatttttgcaaatggatcttacagggttacagggttacaggtgatttaggtaactgactttttttttttttaatagcatatgacttatgggctatgttactttgagcacctacttgttatttgtgggagtgataaaaagaa

SEQ ID NO: 10350 - DNA, 213 bp, Artificial Sequence; identical to SEQ ID NO: 10015
  Synthetic polynucleotide

SEQ ID NO: 10351 - DNA, 207 bp, Artificial Sequence
  Synthetic polynucleotide
atcagcgctctagtcacgattgccaccaagaccttcctccgttatgatcggctacgggctctcatcaccagtatccgccgcttctacccaacggttaccgttaccgtggtcatcgctgacgacagcgacaagccagagcgcgttagtggcccctacgtggaacactatctcatgcccttcggcaaggtgtgcagctagcaggctgaa

SEQ ID NO: 10352 - DNA, 205 bp, Artificial Sequence
  Synthetic polynucleotide
aaaaacagttatgaaaactggatctgcaggcctttcaggccaccatagagcacctagttacagtggtttatccatggtttctggagtgaaacagggatctatctggtcctgctcctaccactcataaggtattctgggacagtaactttaattgctgtctttttgcaaatagaaaaatttttaagatactattcctgcttaagtt

SEQ ID NO: 10353 - DNA, 206 bp, Artificial Sequence
  Synthetic polynucleotide
ggcctggccgccctcggcgtccgcggcgctcaacagcggcgcctcttatatcaagcagcagcccctgtccccctgtaaccccgcggccaaccccctgtcctgtccggcagcctctccacgcactccctggagcagccgtatctgcaccagaacagccacaacgccccagccgagctgcaaggtgagtggggaggccgagggcgccc

SEQ ID NO: 10354 - DNA, 205 bp, Artificial Sequence
  Synthetic polynucleotide
ttatcgtcgtctgtcttttcctgggcctttgcgatggcttcttcatcaccatcatggcccccattgcatttgagctggtgggcccaatgcaggcctcacacacaggccattggctacctcctgggcatgatggccctgccaatgattgctgggccccccattgcaggtgaggctgatattccagggagggcatgaatcagggagt

SEQ ID NO: 10355 - DNA, 205 bp, Artificial Sequence
  Synthetic polynucleotide
aggaaacacaagaccaatcggaagccgcgcacgccctttaccacatcccagctcctcgccctggagcgcaagttccgtcagaaacagtacctctccattgattgcagagcgtgcagagttctccagctctctgaacctcacagagacccaggtcaaaatctggttccagaaccgaagggccaaggcgaaaagactgcaggaggca

SEQ ID NO: 10356 - DNA, 220 bp, Artificial Sequence; identical to SEQ ID NO: 10068
  Synthetic polynucleotide

SEQ ID NO: 10357 - DNA, 207 bp, Artificial Sequence
  Synthetic polynucleotide
acctatcggccgtgctgggtctcagcgaggagagtctgcagtgccggcgcaggcagcgcggggacgcggggtccccttggggctgcccgctgtgccccgaccgaccgtggccccgcagaggcgcagacgcaggcggaggggcaggggcaagggcaggggcaggggcaggggcaagggcaggggcaaggacaggggcaaggacagggg

SEQ ID NO: 10358 - DNA, 207 bp, Artificial Sequence
  Synthetic polynucleotide
gagagaaggaggccaagagaaaccgcaccttcgtcctcaacttcatcaagattcccgtggtcccgcacaatgagtgcagcgaggtcatgagcaacatggtcatggtgtctgagaacatgctgtgtgcgggcatcctcggggaccggcaggatgcctgcgagggcgacagtggggggcccatggtcgcctccttccacggcacctggt

SEQ ID NO: 10359 - DNA, 212 bp, Artificial Sequence; identical to SEQ ID NO: 10140
  Synthetic polynucleotide

SEQ ID NO: 10360 - DNA, 205 bp, Artificial Sequence
  Synthetic polynucleotide
tgccacgatgggaagtgcatctctcggcagttcgtctgtgactcagaccgggactgcttggacggctcagacgaggcctcctgcccggtgctcacctgtgtgtggtcccgccagcttccagtgcaacagctccacctgcatcccccagctgtgggcctgcgacaacgaccccgactgcgaagatggctcggatgagtggccgcag

SEQ ID NO: 10361 - DNA, 212 bp, Artificial Sequence
  Synthetic polynucleotide
gaaatacctaacactgctttggtgaaattttgtaaacctcttatccttagatccaaaagatatgttcatctaggcttgataagcacatgtgcatttataccgcatttataccacactctatagttctttgtggaccagtgcatggtctcattgaacaacatgaggatgctttacatggagcacttaaaatgcttcggcaattatttaaagac

SEQ ID NO: 10362 - DNA, 205 bp, Artificial Sequence
  Synthetic polynucleotide
aagaacgaggaactgcgtctttatcaccatctcttcaacaactatgacccaggaagccggccagtgcgggagcctgaggatactgtcaccatcagcctcaatcaaggtcaccctgacgaatctcatctcactggtaagctacccccaccctcatcttaagccaaaaatcccacttctggccccaaccgctgagctctgtcctaaa

SEQ ID NO: 10363 - DNA, 213 bp, Artificial Sequence; identical to SEQ ID NO: 10222
  Synthetic polynucleotide

SEQ ID NO: 10364 - DNA, 208 bp, Artificial Sequence
  Synthetic polynucleotide
cccaccccctggccgtcgcgggacccgcaggactgagaccatggaggcggtggcggtggccgcggcggtgggggtccttctcctggccggggccgggggccgggggcgcggcaggcgacgaggcccgggaggcggcggccgtgcgggcgctcgtggcccggctgctggggccaggccccgcggccgacttctccgtgtcggtggagcg

SEQ ID NO: 10365 - DNA, 211 bp, Artificial Sequence
  Synthetic polynucleotide
accaatgtcatgcctcaagatcttgatgatgtttgtcagagcaggcaggctacgtttatccaaatgggtgaaaaattcatactcatctttctttaaacgagaaggagaaggtctagattcaatgtgggtcaggtttacatcattctcctagaagagagaatggggagggtgaggagacagtcactggaactaacgcaggccaaagatgcag

SEQ ID NO: 10366 - DNA, 218 bp, Artificial Sequence
  Synthetic polynucleotide
atgttcaggagaccccactcatgtttagcagatgtacttctgtcagttcacttgatagttttgagagtcgttcgattgccagctccgttcagagtgaacctccgttcagagtgaaccatgcagtggaatggtaagtggcattataagccccagtgatcttccagatagccctggacaaaccatgccaccaagcagaagtaaaacacctccaccacctc

SEQ ID NO: 10367 - DNA, 208 bp, Artificial Sequence
  Synthetic polynucleotide
cccccgtgccccacagatcgcaagcaggactggtcagaccatgctatttggtgggaacagaagaggcagtggctgctgcagacccactggacactggacactggacaagtacgggatcctggccgacgcacgcctcttctttgggccccagcaccggcccgtcatccttcggttgcccaaccgccgcgcactgcgcctccgtgccagc

SEQ ID NO: 10368 - DNA, 211 bp, Artificial Sequence
  Synthetic polynucleotide
tccctttcctctccttgagactaatgcccccacccccacccccaccccacctaccggacagatgaacagtttctgctgcagcggctggcagacggggccagacggggccatcgacctctatgccatggtggtggttctctcgaggtgaggaggcaggcagggaatgcctgagccgcagggggcctgggcctggatcccagccggcccagat

SEQ ID NO: 10369 - DNA, 205 bp, Artificial Sequence
  Synthetic polynucleotide
gccgcctcccaaaggtgccacatactgctctctctttctcctccaggaagtccataggactgtcttcatgcgcttgaacatcatcagccctgacctgtctgtctggtgagctccctccaggtctctcgggtttgttctagtggctgaggtcacagtagggcacagcgggcagccctgagaaacggcctgggcacatagcacatgg

SEQ ID NO: 10370 - DNA, 212 bp, Artificial Sequence
  Synthetic polynucleotide
tgtagagaggagggcgtgtgcaaggagtggggccaggagcggggctggacactgctggctccacacaggggcccagcagggagctcgtatgccgctcgtgcgccgctcgtgcctgaagcagacgctgcacaagctggaggccatgatgctcatcctgcaggcagagaccaccgcgggcaccgtgacgcccaccgccatcggagacagcatcc

SEQ ID NO: 10371 - DNA, 206 bp, Artificial Sequence; identical to SEQ ID NO: 10179
  Synthetic polynucleotide

SEQ ID NO: 10372 - DNA, 209 bp, Artificial Sequence; identical to SEQ ID NO: 9863
  Synthetic polynucleotide

SEQ ID NO: 10373 - DNA, 217 bp, Artificial Sequence
  Synthetic polynucleotide
cactcgggcctgtccccacaggtgagtacctcctgaccgtgctggcatctaatgccttcgagaacctgacgcagcaggtgcctgtgagcgtgcgcgcctccgagcgtgcgcgcctccctgccctccgtggctgtgggtgtgagtgacggcgtcctggtggccggccggcccgtcaccttctacccgcacccgctgccctcgcctgggggtgttcttt

SEQ ID NO: 10374 - DNA, 211 bp, Artificial Sequence; identical to SEQ ID NO: 10368
  Synthetic polynucleotide

SEQ ID NO: 10375 - DNA, 214 bp, Artificial Sequence; identical to SEQ ID NO: 10306
  Synthetic polynucleotide

SEQ ID NO: 10376 - DNA, 204 bp, Artificial Sequence
  Synthetic polynucleotide
catttctgttttcctgtagcaaaaccagaaatcctgacttacgacaggctcgtgaatggcatgctccaatgtgtggcagcaggattcccagagcccacaacaatagattggtatttttgtccaggaactgagcagaggtgagatgattatttttggcactgcttataatgcagaggggaaggactgcaattcacttgaatttca

SEQ ID NO: 10377 - DNA, 227 bp, Artificial Sequence; identical to SEQ ID NO: 10257
  Synthetic polynucleotide

SEQ ID NO: 10378 - DNA, 210 bp, Artificial Sequence
  Synthetic polynucleotide
ggccctgagcaatggcctggtgctggcggccctagctcggcggggccggcggggccactgggcacccatacacgtcttcattggccacttgtgcctggcctgcctggccgacctggccgtggctctgttccaagtgctgccccagctggcctggaaggccaccgaccgcttccgtgggccagatgccctgtgtcgggccgtgaagtatct

SEQ ID NO: 10379 - DNA, 206 bp, Artificial Sequence
  Synthetic polynucleotide
ctgagcaaagagaaaaacccaccgttgcagagactcatctcttcttcttctctcaccaggcttacaggaaatggataaatgacagaaggcagggacttgacttgaggagcctcttctaccaggcatcacattcaccaacaaccagctcttcttcctgagttatgctcatgtgagtagactgaggaaggggcatcagggatgagatg

SEQ ID NO: 10380 - DNA, 216 bp, Artificial Sequence
  Synthetic polynucleotide
cttactgatcgattactacttttccctccccatagttaccgtacacgagaagaaattcaggaagtaagaagtaagagtgaccctattatgcttctcaaggttatgcttctcaaggacaggatggtgaacagcaatcttgccagtgtggaagaactaaaggtacagtcacttgttcatggtggtttgaaggttggctttaaaagttgccacccctgg

SEQ ID NO: 10381 - DNA, 208 bp, Artificial Sequence
  Synthetic polynucleotide
gttgttgttgattggaatcgaggagctacaactttaatatatacccatgcctctagtaagaccagaaaagtagccatggtcttgaaggaatttattgaccattgaccagatgttggtaagagaattctcttagatgattcagagctaagttgaaactggcccattatctgagggcttaaagccaagagatagctacagtgagcaggag

SEQ ID NO: 10382 - DNA, 206 bp, Artificial Sequence
  Synthetic polynucleotide
agagcccacattgcaaggggcctacctgccggggggcctggtgcacagtagtgctggtgcgggaggaggggaggcacccccaggaacatcggggctgcggtgcgggaacttgcacagggagctctgcagggggcgccccaccgagttcgtcaaccactactgctgcgacagccacctctgcaaccacaacgtgtccctggtgctgg

SEQ ID NO: 10383 - DNA, 206 bp, Artificial Sequence
  Synthetic polynucleotide
tacgtgttccaaggggacagtagcccctgctcggccttcgagttccactgcctaagtggcgagtgcatccactccagctggcgctgtgatggtggccccgccccgactgcaaggacaaatctgacgaggaaaactgcggtatgggcggggccagggtgggggcggggcgtcctatcacctgtccctgggctcccccaggtgtggga

SEQ ID NO: 10384 - DNA, 205 bp, Artificial Sequence
  Synthetic polynucleotide
tttacaaagcgggttctaggagagagtggagagatggatgctctacgaatacagatggaagagcgattcatggcttccaatccttccaaggtctcctatcaatcagccaatcactactactttaaaacgaaaacaagaggaagtatctgctgtcattattcagcgtgcttacagacgccaccttttaaagcgaactgtaaaacaa

SEQ ID NO: 10385 - DNA, 218 bp, Artificial Sequence
  Synthetic polynucleotide
gcggcacgtgtgtggagggcggcggcgcgcaccgctgctcctgcgcgctgggcttcggcggccgcgactgccgcgagcgcgcggacccgtgcgccgcgcggacccgtgcgccgcgcgcccctgtgctcacggcggccgctgctacgcccacttctccggcctcgtctgcgcttgcgctcccggctacatgggagcgcggtgtgagttcccagtgcacc

SEQ ID NO: 10386 - DNA, 211 bp, Artificial Sequence
  Synthetic polynucleotide
agcccgaccccgggcaagcgcggcaagaagggcagccccagcgcgcagtccttcgaggagctgcagagccagcgcatcctggccaacgtgcgcgagcgccagcgccagcgcacccagtcgctcaacgaggccttcgcggcgctgcgcaagatcatccccacgctgccctctgacaagctgagcaagatccagacgctcaagctggccgcca

SEQ ID NO: 10387 - DNA, 205 bp, Artificial Sequence
  Synthetic polynucleotide
ttaagggtgacatctgcgctttaaagggtccgggtcagctgactcccgactctgtggagtctagctgccagggtcgcggcagctgcggggagagatgactgactggggagcgacccagcacggcgctcccggacagacgctgggggccgcggattctgggcttctggggaggctgtagggtttgggtgtttgccgcgatcttcct

SEQ ID NO: 10388 - DNA, 207 bp, Artificial Sequence
  Synthetic polynucleotide
caccgacccacacgtttatctcaggcaggagggagccaaagtttctctgatgtctcctgatcagcttcggaacaagtttccctggataaacacagagggagtgagtggctttggcgtcttatggtgaggcttgcttgcagaggggacagcttttttcctgaagatggagactaaggggtgctacacgttgggagtctcggtactcca

SEQ ID NO: 10389 - DNA, 217 bp, Artificial Sequence
  Synthetic polynucleotide
cgggtgagcacagtggccctggcccggggggccgcgcggggtgcctgccaggggggaggctcctaaggcccaccccggtgttttccccgccagctgccttccccgccagctgccttctgccagagcctgggcgccgccgcccccgaggtccgctgctgtgtggatgccgtgaacttcgtggccgagagcacgagagatcaggaggccaccggcgagg

SEQ ID NO: 10390 - DNA, 212 bp, Artificial Sequence; identical to SEQ ID NO: 10033
  Synthetic polynucleotide

SEQ ID NO: 10391 - DNA, 209 bp, Artificial Sequence
  Synthetic polynucleotide
gaacaccgagctcaggttggaatgatctaaggacacaaaagcatggggcctcggggctggggcggtgcgactaccggaggcgcaagttgcgcacggggtcccggcccgggagcgatacactgcctccccggtgtcagtgctccagacggtctccgccatgacagctgcgacgcgccgcgactgcgccggaaagcgcgccgctctgtttt

SEQ ID NO: 10392 - DNA, 213 bp, Artificial Sequence
  Synthetic polynucleotide
ctcccgtcacaagctcctgcctctcttttctccccatacaggacgggctctacgagtgcattctctgtgcctgctgtagcaccagctgccccagctactggcccagctactggtggaacggagacaaatatctggggcctgcagttcttatgcaggtgaggtgctccttaattgctttaagagaaattgaaactcaagcatccagaagtccaa

SEQ ID NO: 10393 - DNA, 205 bp, Artificial Sequence
  Synthetic polynucleotide
gcggagtgaatcagctcggtggtgtctttgtcaacgggcggccactgccggactccacccggcagaagattgtagagctagctcacagcggggcccggccggccgtgcgacatttcccgaattctgcaggtgatcctcccggcgccgccccactcgccgcccccgcggccctccactctcaacgccctctcttcatttcttactg

SEQ ID NO: 10394 - DNA, 208 bp, Artificial Sequence
  Synthetic polynucleotide
tttctgagaagcttcacgaggacaaggctgcagagccgggtgatgccctcgacctaatcattcacagtgcaagggagctgggccatgagccctccatgcaccatgcaggagctgaaggtaggtgctgacaggccgctccttctcccctcttttgcattcccagcaggtccctacaccaatgctgcatccccagagccacatcttgtgt

SEQ ID NO: 10395 - DNA, 215 bp, Artificial Sequence; identical to SEQ ID NO: 10278
  Synthetic polynucleotide

SEQ ID NO: 10396 - DNA, 206 bp, Artificial Sequence
  Synthetic polynucleotide
ccatctcttcaacaactatgacccaggaagccggccagtgcgggagcctgaggatactgtcaccatcagcctcaaggtcaccctgacgaatctcatctcacctcactggtaagctacccccaccctcatcttaagccaaaaatcccacttctggccccaaccgctgagctctgtcctaaagctcacttctggccctgaaatctcac

SEQ ID NO: 10397 - DNA, 212 bp, Artificial Sequence
  Synthetic polynucleotide
ggccgagcctgcctgcagtgagcgtcccactctgtccctgcaggagatcgtgctggtggtgttcttcgggacggagtacgtggtccgcctctggtccgcctctggtccgccggctgccgcagcaagtacgtgggcctctgggggcggctgcgctttgcccggaagcccatttccatcatcggtgagtcatgcctgccctgtggaggtcacgc

SEQ ID NO: 10398 - DNA, 205 bp, Artificial Sequence
  Synthetic polynucleotide
acggagtttgcgtttgaggtagttgtgcctgaccttgccctcatccgcttcttggtggaagattatgatgcctcctccaagaatgacttcattggccagagagagtaccatccccttgaacagcctcaagcaaggtgagtgtcaagagaaggggatggccaaggtggtgggaagcagggcctggcgtctcttgggctggggctgg

SEQ ID NO: 10399 - DNA, 208 bp, Artificial Sequence
  Synthetic polynucleotide
tgaacagttcagtggaggatgccaagacatcaatgaatgtggctctgcgcaggccccctgcagctatggctgttccaataccgagggcggttacctgtgtgctgtgtggctgtccacctggttacttccgcataggccaagggtaagcagtgctcttcctggtcatggttggagattctttcattcgtaatataattaagtatactga

SEQ ID NO: 10400 - DNA, 215 bp, Artificial Sequence; identical to SEQ ID NO: 10242
  Synthetic polynucleotide

SEQ ID NO: 10401 - DNA, 209 bp, Artificial Sequence
  Synthetic polynucleotide
agacttcgtccaggaatgcgctcaacgtctcccaggcctggcgccatgcgctgccctttgccaagatccgccgcgtgcaggaactgtgcgctggtgcgctggtgcgctgcagctgctgggctaccggcctgtgtactctgaggacgagcagcgcaacctcgcccttgatctggtgctgccacgaggcctgaacggcttcacttgggcat

SEQ ID NO: 10402 - DNA, 217 bp, Artificial Sequence; identical to SEQ ID NO: 9926
  Synthetic polynucleotide

SEQ ID NO: 10403 - DNA, 205 bp, Artificial Sequence
  Synthetic polynucleotide
ttggcaccatatgtgggtggatactaatgaatcctttcttaaccttcccagaacttttggagaaatcaatcagtagaaggcgggacaccgaagccatacatacagaaagccaaaatcctttattcatcctgcatgaatgagagtgagtgatgaagaaaactaaataaaatatttaccatccctatcctttagagttctattaatg

SEQ ID NO: 10404 - DNA, 205 bp, Artificial Sequence
  Synthetic polynucleotide
gcgctaacgcctgcccttgctctgcccctgcccttctccccagtgggccccaccatcctgaataagattgaagcggctctgaccaaccagaacctgtctgtctgtggatgtggtggaccagtgcctcgtctgcctcaaggaggagtggatgaagtaagcaacagtgtgggtgaggcccctttgcttgcgaccctggagaaaacct

SEQ ID NO: 10405 - DNA, 225 bp, Artificial Sequence
  Synthetic polynucleotide
aaccagcccctgggagcagctgccctgtcccccagggcccagggctgcctcacctccaaagtaggagccgtcggccagcttggtctccttgttgcccttggtgagcacgctgggtgagcacgctgaccacgccatgctggatgaagtacatcttcttgccaatggtgccttcccggatgatgtagtccccaggctggaagacctcgaaacgcagcttggtcagca

SEQ ID NO: 10406 - DNA, 215 bp, Artificial Sequence
  Synthetic polynucleotide
gtagcccctgctcggccttcgagttccactgcctaagtggcgagtgcatccactccagctggcgctgtgatggtggccccgactgcaaggacaaatctgaaaggacaaatctgacgaggaaaactgcggtatgggcggggccagggtgggggcggggcgtcctatcacctgtccctgggctcccccaggtgtgggacatgcagtgatttaggtgc

SEQ ID NO: 10407 - DNA, 208 bp, Artificial Sequence
  Synthetic polynucleotide
tcttatcagaaaggatacattgttttaattgttcctcattatatagaatgagagaacatcatttctctccttttcctcccaggtggccgtcgaggaccgaggaccgagtcaggcagctgcatgaagcccacagggactttggtccagcatctcagcactttctttccagtaagtcattttcagcttttatcacttaactttattgcat

SEQ ID NO: 10408 - DNA, 205 bp, Artificial Sequence
  Synthetic polynucleotide
ttctccatgctggctgctggggtcatgcacgcagtagccacggcctgcagcctgggcaagctggtgagctgtggctgtggctggaagggcagtggtgagcaagcaggatcggctgagggccaaactgctgcagctgcaggcactgtcccgaggcaagagtttcccccactctctgcccagccctggccctggctcaagccccagc

SEQ ID NO: 10409 - DNA, 207 bp, Artificial Sequence
  Synthetic polynucleotide
cctgcctgcagcagcgccgcgggagcgagggagccagggctgcgggtgtggcggggcccctgcccgggcgggcgaagggaacagctgcctgctcttcctgggtgggtttctttggcctctcgctggccctccacctgctgacgttgtgctgctacctagagttgcgctcggagttgcggcgggaacgtggagccgagtcccgccttg

SEQ ID NO: 10410 - DNA, 209 bp, Artificial Sequence; identical to SEQ ID NO: 10214
  Synthetic polynucleotide

SEQ ID NO: 10411 - DNA, 205 bp, Artificial Sequence
  Synthetic polynucleotide
aaccatttcataacagggaccaaagaattgaaccccgatccggttcacagaaaaataaactgctcacccgtctccacctgtcagtttcagggagaccttgcttgcatcaccatggggagtgtgataccagatggggccaaatgggatgatgactgtaatacctgccagtgcctgaatggacggatcgcctgctcaaaggtaggac

SEQ ID NO: 10412 - DNA, 214 bp, Artificial Sequence; identical to SEQ ID NO: 10306
  Synthetic polynucleotide

SEQ ID NO: 10413 - DNA, 217 bp, Artificial Sequence; identical to SEQ ID NO: 9877
  Synthetic polynucleotide

SEQ ID NO: 10414 - DNA, 212 bp, Artificial Sequence
  Synthetic polynucleotide
gctcactctccatggtgtctgagtgcctgttctcgctcatcaatggggacgacatgtttgtgacgttcgccgccatgcaggcgcagcagggccgcagcagggccgcagcagcctggtgtggctcttctcccagctctacctttactccttcatcagcctcttcatctacatggtgctcagcctcttcatcgcgctcatcaccggcgcctacg

SEQ ID NO: 10415 - DNA, 205 bp, Artificial Sequence
  Synthetic polynucleotide
cataatttcattgagcgcaaatatatctgaaacttctagcaataaaactagtagtgcagatacccaaaaagtggccattattgaacttacagatgggtgggtggtatgctgttaaggcccagttagatcctcccctcttagctgtcttaaagaatggcagactgacagttggtcagaagattattcttcatggagcagaactggt

SEQ ID NO: 10416 - DNA, 207 bp, Artificial Sequence
  Synthetic polynucleotide
gggtgcttcaggggtgtctgcaaaggagctctgcttcacagcagtgttcccttcttttaggggtctagcccagcagctggtggacccagcccggccaggagcaggagatttcaaccaagcagccatggagctaggggccacagtgtgtaccccacagcgcccactgtgcagccagtgccctgtggagagcctgtgccgggcacgcca

SEQ ID NO: 10417 - DNA, 205 bp, Artificial Sequence
  Synthetic polynucleotide
cgtgctcccggctacctttgtgtttttggctctgatgctttctattgttatccctccttttggcgaataccccgctttgacccttcacccctggatatatgtatgggcagcagtacaccttcttcaggtgcgcggactcggggtcaccattctcctctgtgggtttggggcacctgggtcacatgctgcttagaagggccctgac

SEQ ID NO: 10418 - DNA, 205 bp, Artificial Sequence
  Synthetic polynucleotide
ccagaactcagtttagatactgggacactggagaaaaagtcaggagcttgtgaagatcatagtatggctcaagctggtgaagtcgtgctgaagatgaaagaaagtggaagggatgacctgccattcatgtactagcactattgaaggaaaaattgggaaactgcaaggtgttcagcgaattaaaggtaatgtgtctggtgttgat

SEQ ID NO: 10419 - DNA, 211 bp, Artificial Sequence; identical to SEQ ID NO: 10368
  Synthetic polynucleotide

SEQ ID NO: 10420 - DNA, 207 bp, Artificial Sequence
  Synthetic polynucleotide
gttacggctgtctccacccctcagggctaaggtgccctgaggcagagggccaagtcactcacctggactgctgcagacagtgcaagcggaaggtgacagtgcctgcctgtggtctctgtgcggagtccaaagcggctcaggcgttccccctgtggcatgccattgggacagcctcaggtttctgctctctctagacacccccgcacc

SEQ ID NO: 10421 - DNA, 207 bp, Artificial Sequence
  Synthetic polynucleotide
ctgaccccccgcgcgcgaggcagcgatgacgtgggccctgccctcccacgccccattccccttccctgaggccaccgccccctccttgcaggtccagcaaccaaccacggcatcagcctgcaggagatcccacccgagcggcgacggaagctggagaaggcgcggccgggccagttctcttgagaagtgaggcccggccccggacag

SEQ ID NO: 10422 - DNA, 208 bp, Artificial Sequence
  Synthetic polynucleotide
ggcggggggccccgggcgcggctgcgggccctgcgagcccccctgcctctgcggcccagcgcccggcgccgcctgccgcgtcaactgctcgggccgcgggccgcgggctgcggacgctcggtcccgcgctgcgcatccccgcggacgccacagcgctgtgagtagcgggcccagcggcacccgggagaggccgcgggacgggcgggcg

SEQ ID NO: 10423 - DNA, 207 bp, Artificial Sequence
  Synthetic polynucleotide
ggaagcagagtcattgtgaccagaggggtttgtgtggctgaagaggcaggaggaacagtgtatccacagcgtgggaccatgccaggcacaaaacggtttcggtttcaacatgtcattgagaccccggagcctggcaagtgggaggtgagaccccttcttcatgttggctttctgtgctgattcctagaattatttttcatccagtct

SEQ ID NO: 10424 - DNA, 225 bp, Artificial Sequence; identical to SEQ ID NO: 10236
  Synthetic polynucleotide

SEQ ID NO: 10425 - DNA, 219 bp, Artificial Sequence
  Synthetic polynucleotide
acctgggagaagacgcccgcttccgcatgttcagcaagcagggagtgttgactctggagattagaaagccctgcccctttgacgggggcatctatgtctgcgggggcatctatgtctgcagggccaccaacttacagggcgaggcacggtgtgagtgccgcctggaggtgcgaggtgaggagccctcggggccagggcctgggagatgggaagagcggg

SEQ ID NO: 10426 - DNA, 205 bp, Artificial Sequence
  Synthetic polynucleotide
agatttttctccctccagacgtgccgggcctgcagtgcgtgaagtacattcagggactccagtggggaactcagcaaatactcagtgaacacaccaggatggatgacgcaccaagggccccatgacagattcatcgaacttaatagtacccttttcctgctgagattcatcaatgccaatgtcattgctgaactgttcttcaggc

SEQ ID NO: 10427 - DNA, 209 bp, Artificial Sequence
  Synthetic polynucleotide
ttctcagttttgtacccattaattaaaacaaattatcttcatcaatttattcagcgaataggtcatggtgataaaaaccacaccgatgctgaccgttctcctatcctatttttctccagtttattgattgtgtgtggcaaatgtcaaaacaggtaaggaatatgagggatgaaaatacattcaactcattgtttaaattaaacatttta

SEQ ID NO: 10428 - DNA, 217 bp, Artificial Sequence
  Synthetic polynucleotide
ccaggcgcccggcggggcagcgcgggcctggccaagaagtgccccttctcgctggagctggcggagggcggcccggcgggcggcgcgctctacgcgcccatcgcgcccatcgcgcccggcgccccaggtcccgcgccccctgcgtccccggccgcgcccgccgcgcccccagttgcctccgaccttggcccgcggccgccggtgagcctagacccgc

SEQ ID NO: 10429 - DNA, 205 bp, Artificial Sequence
  Synthetic polynucleotide
cctgtgtgattgctgttttaagttcgataccttgtctccaatccactctaagatgtcagcacactcctgtacatactgctggaacttcagggcccgcagcaacaactggtcacccttctccagggtcagctctaacagcaggtcccacaggtggcgtagctcctctatatgggcctttaggaaagaggggcaaaaccactcagcc

SEQ ID NO: 10430 - DNA, 217 bp, Artificial Sequence
  Synthetic polynucleotide
gaggacctgggggccgccatggaggaggccctcatcctggacaacaagtacacggagcacagcaccgtgggcctcgcccagcagtgggaccagctggaccagctgggccagctgggcatgcgcatgcagcacaacctggagcagcagatccaggccaggtacccgggagggctgtgggccaggctcagcccagagcagggggaggaaaagacacagt

SEQ ID NO: 10431 - DNA, 229 bp, Artificial Sequence
  Synthetic polynucleotide
gcccttcttattcttctcgtagaacgggaacttcgcgatgatgtactggtagatgccggacagcgtgagcctcttctccgcgctctcgcggatcgccatggcgatgagcgccacggcgatgagcgccacgtacgagtacgggggcttctgcgccgggtccggcttctccggggctgtcccgccgccacccccaccgcccttgcctgggctcggcggcggcccttctggc

SEQ ID NO: 10432 - DNA, 206 bp, Artificial Sequence
  Synthetic polynucleotide
ccttcttctccctcttcttcctcttcactctgctctcttctcttcttttcccctttcctctcctctccctttcctcaggtcacagcggagtgaatcagctcagctcggtggtgtctttgtcaacgggcggccactgccggactccacccggcagaagattgtagagctagctcacagcggggcccggccgtgcgacatttcccgaa

SEQ ID NO: 10433 - DNA, 208 bp, Artificial Sequence
  Synthetic polynucleotide
ccagcagctcctacaccggcggcccctgcaccagccccctcctggcccctgtcatcttctgtcccttcccagaaaacctaccagggcagctacggtttccggtttccgtctgggcttcttgcattctgggacagccaagtctgtgacttgcacggtcagttgccctgaggggctggcttccatgagacttcaatgcctggccgtatcc

SEQ ID NO: 10434 - DNA, 212 bp, Artificial Sequence; identical to SEQ ID NO: 10414
  Synthetic polynucleotide

SEQ ID NO: 10435 - DNA, 206 bp, Artificial Sequence
  Synthetic polynucleotide
catcctgttcatccgggccgctcgccgcgtgcattcaggcacttaccaggtgacggtgcgcattgagaacatggaggacaaggccacgctggtgctgcagggcaggttgttggtgcgtggccaaggcctccttgagcccccttgtttcccttccctgggctgggctgctggggccaagggtggggccaggggacccaacccacagc

SEQ ID NO: 10436 - DNA, 205 bp, Artificial Sequence
  Synthetic polynucleotide
gactttgaaacatgctcttaatatttggtgcaggacatttcaaagctgagccctcttgcattgcctttttcagatgacctcaagcagtttggcctaacaaacaaccagtattccgttccgaggttgcatcagatccctgaagctcaccaaaggcacaggcaagccactggaggttaattttgccaaggccctggaactgaggggc

SEQ ID NO: 10437 - DNA, 205 bp, Artificial Sequence
  Synthetic polynucleotide
attccaaaagctgccattacaacatctctgtagacccatttccttttgagcacttcagagggggaggaggagtttgtgatgattgtgagcataacactacatacaggtaagtagcaaataaattcctgagttggtttggaggcctgtgtgcttctatctacaatgcatattattttaaattatgttattgctatcttatttaagg

SEQ ID NO: 10438 - DNA, 205 bp, Artificial Sequence
  Synthetic polynucleotide
ttccttaaagaagtaatgctgatccaggcttttttctttttctgtgactctttgacacgtaataatattgacttttctttctttccagacactacaacaacaacaggagtgcaaacttctctacagccgaaaagagggtcaaaggcaagaaaacaaaaacaaaaatagatataaaaacatcctgccctgtaagtatcaatattcc

SEQ ID NO: 10439 - DNA, 205 bp, Artificial Sequence
  Synthetic polynucleotide
accgagccacatgtcttcgatctacaaagttcaccatctataacaacatgttctgtgctggcttccatgaaggaggtagagattcatgtcaaggagatagatagtgggggaccccatgttactgaagtggaagggaccagtttcttaactggaattattagctggggtgaagagtgtgcaatgaaaggcaaatatggaatatata

SEQ ID NO: 10440 - DNA, 204 bp, Artificial Sequence
  Synthetic polynucleotide
ctgtgtgccctgctccaggtgatggtcctggcgctgatgacggtcgagctgttcggcatgatgggcctcatcggaatcaagctcagtgccgtgcccgtggtggtcatcctgatcgcttctgttggcataggagtggagttcaccgttcacgttgctttggtatgggagacatttgaagcaaaaactttgtgaaaaaacaaccca

SEQ ID NO: 10441 - DNA, 205 bp, Artificial Sequence
  Synthetic polynucleotide
aaaacctggctggttgggaacaagcttgtcactgtgacgacaagcgtgggaaccgggacccggtcgttactaggcctggactcgggggagctgcagtccgtccggcccggagtcgaggtgactgcaccttcctttcctccgcgcctgccagcctcgacaccggctgtcccgagcccaggcccacgtggcaccctcgtaccagcct

SEQ ID NO: 10442 - DNA, 215 bp, Artificial Sequence; identical to SEQ ID NO: 10042
  Synthetic polynucleotide

SEQ ID NO: 10443 - DNA, 206 bp, Artificial Sequence
  Synthetic polynucleotide
agccattggggaagagcctccccaccaagcctctttctctctcttccagatatcgatgagtgtcaggatcccgacacctgcagccagctctgcgtgaaccgaacctggagggtggctacaagtgccagtgtgaggaaggcttccagctggacccccacacgaaggcctgcaaggctgtgggtgagcacgggaaggcggcgggtggg

SEQ ID NO: 10444 - DNA, 223 bp, Artificial Sequence
  Synthetic polynucleotide
gacaaggcgcggctgagccccgacccccggggccgcccctgagccccgcctctccctccccggcagaaacgtccgcgcggtgcgggtggtcctgggagcccataacctctcccataacctctcgcggcgggagcccacccggcaggtgttcgccgtgcagcgcatcttcgaaaacggctacgaccccgtaaacttgctcaacgacatcgtgattctccaggtg

SEQ ID NO: 10445 - DNA, 211 bp, Artificial Sequence; identical to SEQ ID NO: 10229
  Synthetic polynucleotide

SEQ ID NO: 10446 - DNA, 205 bp, Artificial Sequence
  Synthetic polynucleotide
gtgtctccagccgtgagctggtgaagaaggtctccgatgtcatatggaacagcctcagccgctcctacttcaaggatcgggcccacatccagtccctcttccttcagcttcatcacaggttggagcccagtaggtgggaatcttatccatgacccacttcttcaaaaccctccatggtttacagaacccttttaagaactgtaag

SEQ ID NO: 10447 - DNA, 229 bp, Artificial Sequence
  Synthetic polynucleotide
ctgtgtgcaatgtagggggtcatgaactttgaaggatccactttcttccggatgaccttcctcctctccaccggctttgctgatgctggctgtgccagtgctggctgtgccagagctggctgtgccagagctggtttggaagtttctgattgctcatagtcagatgtccttgttgtcgtagtctcataaatttttgttattgtctgaaaatttgatatgcagttcaaca

SEQ ID NO: 10448 - DNA, 208 bp, Artificial Sequence
  Synthetic polynucleotide
gggcagggatggggcaggaggcaggggcaagatggaggcctgggggaacaaggctgtctcccatctcatctgacttctcttggtttggttgtcagggccccgggcccccgtggcctgcctggtgagagaggtcgccctggagcccctggccctgctgtaagtactcctggccccttgggggatccctgagctctggaaggggctcccc

SEQ ID NO: 10449 - DNA, 205 bp, Artificial Sequence
  Synthetic polynucleotide
ctggagtgtcgagtccctcagccttgcaattctggggtggagggaagagtgggcagcccacccacccactttctcctggcagccaacagcatgattgacagacaggaagccgcgcctgctcttccccaccaactccagcagccacctggtggccttgcaggggcagccattggtcctggagtgcatcgccgagggcttgtgagtc

SEQ ID NO: 10450 - DNA, 205 bp, Artificial Sequence
  Synthetic polynucleotide
atggggagagacagcccttgctgagcagatcccgtccttgccctctcccagggaggacccgtggcgtgtggcgaagatggtcaagtcctacctgcagcagcagcacaacatcccacagcgggaggtggtcgataccactggcctcaaccagtcccacctgtcccaacacctcaacaagggcactcccatgaagacgcagaagcgg

SEQ ID NO: 10451 - DNA, 204 bp, Artificial Sequence
  Synthetic polynucleotide
gctgtggactgagttacctttgtgtcctgtgttggttccacagggattgtgtgcacactctgcattccagggacacgtggctgaagaaagcaagagtggtggtgaggcttggagaagtaccctacaaggtaactggagctggggggtccctgtggggagtggtgacacaggcctgtagctgagcgggagagctgggggcagaga

SEQ ID NO: 10452 - DNA, 205 bp, Artificial Sequence
  Synthetic polynucleotide
ctgttatcttctctcctaggctgacacaggcaagaatttagtcacgctccccaatacaactgccactgcaattctgtgcagtgacgagactatctggctggctggagcctgaagttctcttttcagggcctcgtcaaggtgagatgatctagagaaaacttcacacgggagtgaacaaatgtttctttcaaagagattaagagtt

SEQ ID NO: 10453 - DNA, 206 bp, Artificial Sequence
  Synthetic polynucleotide
atttggggacacgccactgacacagagcatccaggccaatgtgacggtggcccccgagcgcctggtgcccatcattgagggtggctcataccgcgtgtggtgtggtcagacacacgggacctggtgctggatgggagcgagtcctacgaccccaacctggaggacggcgaccagacgccgctcagtttccactgggcctgtgtggc

SEQ ID NO: 10454 - DNA, 209 bp, Artificial Sequence
  Synthetic polynucleotide
ccgcaaccacacctacaatacctatatcgggcagggttacatcatccccgggatggaccaggggctgcagggtgcctgcatgggggaacgccggagaattggagaattaccatccccccgcacctcgcctatggggagaatggaactggtaggggcgttccccagccaccacctcagctcctcctccgaactgcccattgtgtctaggc

SEQ ID NO: 10455 - DNA, 206 bp, Artificial Sequence
  Synthetic polynucleotide
cgcctggtgcccttctccagccccaggccccccggagagccgccgggtggggagcccctgatggaggactgcgagaagagcagcgacacttgcaaccccctcccctgtcaggtatcccgggcgacgggcgggcgagggaggaccgggcgtggcagcggtggtgcgtctaccccgctcacccagctctgctctctggctgcaggcgc

SEQ ID NO: 10456 - DNA, 212 bp, Artificial Sequence; identical to SEQ ID NO: 10230
  Synthetic polynucleotide

SEQ ID NO: 10457 - DNA, 205 bp, Artificial Sequence
  Synthetic polynucleotide
gggagaagtgggagctggacctggacatcaaggaggtcttcgtccaccccaactacagcaagagcaccaccgacaatgacatcgcactgctgcacctggctggcccagcccgccaccctctcgcagaccatagtgcccatctgcctcccggacagcggccttgcagagcgcgagctcaatcaggccggccaggagaccctcgtga

SEQ ID NO: 10458 - DNA, 205 bp, Artificial Sequence
  Synthetic polynucleotide
atagtaggggtggagatgccaagggcacccaggagaggctctcggcatcaggaagggcctggcccagagatgcctcccctccctccctgcccccaggagtgagtggttcaccgtcttggagcattaccgccgcacccactgcgtggtgccagagctcatcattggcaatggctactacttccgcgtcttcagccagaatatggtt

SEQ ID NO: 10459 - DNA, 205 bp, Artificial Sequence
  Synthetic polynucleotide
acctggggaacccctagccggcatggacacgactcttgtctacaagcacctgccggctccgccttctgcagccccgctgccagggctggactcctcggccggccctgcaccccctactgtgtgtgggtcctgagggtcagcaggtgagcggggagtgggggtcagggtgggctcttcaaggagcccaggacctacggggcggatg

SEQ ID NO: 10460 - DNA, 205 bp, Artificial Sequence
  Synthetic polynucleotide
gcctaagtgtcttccccggaggtgagattatctccgcctgtgctggacacctccctttctcctgcagccatggatgccgctctgctcctgaacgtggaaggaaggggtcaagaaaaccattctgcacgggggcacgggcgagctcccaaacttcatcaccggatcccgagtgagtggggcccctccggagcagacagggtccccc

SEQ ID NO: 10461 - DNA, 206 bp, Artificial Sequence
  Synthetic polynucleotide
tatgagtaaccagagtcttattcttcctcatctccaggtctatggattctggggtgccacaactcagactttcggaacagaggcatgaccgccttactgaaatgaaggtttctagttgtgacaagaacactggtgattattacgaggacagttatgaagatatttcagcatacttgctgagtaaaaacaatgccattgaaccaaga

SEQ ID NO: 10462 - DNA, 209 bp, Artificial Sequence
  Synthetic polynucleotide
agacagtccccgctacaaccccagccctcccaagactggggctaccgtctgaccctgcaagccccctcaggtgttcaccacatcaagcgccgggacatcgggacatcgtgctcaagtgggagctgggggagggcgcctttgggaaggtcttccttgctgagtgccacaacctcctgcctgagcaggacaagatgctggtggctgtcaag

SEQ ID NO: 10463 - DNA, 206 bp, Artificial Sequence
  Synthetic polynucleotide
ttttcttattcccacagtgtatcggctagcctatctccggctaaatacactttgtgaacgccttctgtctgagcacccagaattagaacatatcatctggtctggacccttttccagcacaccctgcagaatgagtatgaactcatgagagacaggcatttggaccaagtaagaaaatcaagcacttcaccttctctcctccctac

SEQ ID NO: 10464 - DNA, 206 bp, Artificial Sequence
  Synthetic polynucleotide
gcccgcccattgctgccctactggctgctggtgttcctggctgccctcaatgccctgctgcagtggctgctgcggccactggtgctctacgcacccctgccctgctgaacccctacacgctggccgtggccaacaccaccttcaccgtcagcaccgacaaggctcagcgccatttcggctatgagcccctgttctcgtgggaggat

SEQ ID NO: 10465 - DNA, 205 bp, Artificial Sequence
  Synthetic polynucleotide
accctttgcaagaaaaacggcttcaaagtctacgtatacccacagcaaaaaggggagaaaatcgccgaaagttaccaaaacattctagcggccatcgagggagggctccaggttctacacctcggaccccagccaggcgtgcctctttgtcctgagtctggatactttagacagagaccagttgtcacctcagtatgtgcacaat

SEQ ID NO: 10466 - DNA, 205 bp, Artificial Sequence
  Synthetic polynucleotide
aaggtttttgctgacattcagagtgaagaaattttacaacataaccaaaatatgtctggattggagaaagtttctaaaatatcaccttgtgatgttagttagtttggaaacttcagatatatgtaaatgtagtatagggaagcttcataagtcagtctcatctgcaaatacttgtgggatttttagcacagcaagtggaaaatct

SEQ ID NO: 10467 - DNA, 211 bp, Artificial Sequence
  Synthetic polynucleotide
caggagagtggctcagcagctctggaacctgcagcccccctgccccgccacagtccgcttctggctgaccccgccggctttcccggcgcaggtactacgagaccgagaccggcagcatcaagccgggtgtgatcggtggctccaagcccaaagtggcgacgcccaaagtggtggacaagattgctgaatacaaacgacagaacccgactat

SEQ ID NO: 10468 - DNA, 217 bp, Artificial Sequence; identical to SEQ ID NO: 10110
  Synthetic polynucleotide

SEQ ID NO: 10469 - DNA, 211 bp, Artificial Sequence; identical to SEQ ID NO: 9917
  Synthetic polynucleotide

SEQ ID NO: 10470 - DNA, 211 bp, Artificial Sequence
  Synthetic polynucleotide
ttctcgccctgcaggacggggaggtttactgcatcgacgcgcggttctacgggaacgtcagccggttcatcaaccaccactgcgagcccaacctggtgcccgtgcccgtgcgcgtgttcatggcccaccaggacctgcggttcccccggatcgccttcttcagcacccgcctgatcgaggccggcgagcagctcgggtacgcaccgccccg

SEQ ID NO: 10471 - DNA, 205 bp, Artificial Sequence
  Synthetic polynucleotide
cctggcctctggaaagtccatgccccatcctcctgcagccctgcccttccctccccatctcgctcattcccccttctcttctttgaggtgtgcccggccggccggggcaggcgccctggagcctggcgccccaggcagctgctacctggatgcagggctgcggcggcgcctgcgggaggagtggggcgtgagctgctggaccctg

SEQ ID NO: 10472 - DNA, 205 bp, Artificial Sequence
  Synthetic polynucleotide
gggcgtgtggagcggccccgtggtaatctctcttctaccactttttcatgccttgcagcactttgcccatagggaggaaggggaagtgccccagctcgctcgctgtacatggcctggctggagaccctgtcccaggacctcagacctccagtcatcctgatccgaggaaaccaggaaaacgtgctcaccttttactgccagtaac

SEQ ID NO: 10473 - DNA, 214 bp, Artificial Sequence; identical to SEQ ID NO: 10306
  Synthetic polynucleotide

SEQ ID NO: 10474 - DNA, 209 bp, Artificial Sequence
  Synthetic polynucleotide
tgctactggcgacctgcgagttgtctcaggtaatgtgacctttgcccctggggaaaccattcaaaccttgttgttagaggtcctggctgacgacgttccgacgttccggagattgaagaggtgagaggactggctagtatagaatgacactgtaaatcataccgtatctatagtgactagaacagatggccattgtaacattttggaga

SEQ ID NO: 10475 - DNA, 210 bp, Artificial Sequence
  Synthetic polynucleotide
aagacggggaggtgggagggggacacgggaggtgagtcccgagctcacggcgtcccccaccgccacagcttaccgcatccacgtgaacttgagcactgtgagcactgtggggattctccgtgctctggactcgggctaccaggtggagctgcgaggccgcacggagctgaaggtgaggcagggccccaacccctcccggaggccccgccc

SEQ ID NO: 10476 - DNA, 204 bp, Artificial Sequence
  Synthetic polynucleotide
gaggcctgccgctcctacagccacgtggtgctcaaggaggtgcgcttcttcaacctgcaggtgctctacccgctgctcagcgaccccgcgctcaacctacgacgcatcgtgcacctggtgcgcgacccgcgggccgtgctgcgctcccgggagcagacagccaaggctctggcgcgtgacaacggcatcgtgctgggcaccaac

SEQ ID NO: 10477 - DNA, 207 bp, Artificial Sequence; identical to SEQ ID NO: 10220
  Synthetic polynucleotide

SEQ ID NO: 10478 - DNA, 217 bp, Artificial Sequence
  Synthetic polynucleotide
cagcgcgttcctgctcaggtccagctcccggagctcggccaggccgctgaagagcgcgggctgcaggtaggccagcctgttgcccgccagcaccagctcgcgcaggctgcgcaggctgcccaggccgcggaacgccgcatcggggagcaccgccaggctattccagccgaggttgaggtcccagaggctgccgaggccctcgaagagcccgtcctcc

SEQ ID NO: 10479 - DNA, 217 bp, Artificial Sequence
  Synthetic polynucleotide
agcctcggacccggagcccggccctgccgggcgggagaagccccggcccctgcagggcgctagaggggggccaggccgaggtccggctgcgcagaaacgccgctgcgcagaaacgccagctccgcggggaggctgcaggggctggcggggggcgccccggggcagaaggagtgcaggcccttcgaagtgtacctgccctcgggaaagatgcgaccta

SEQ ID NO: 10480 - DNA, 215 bp, Artificial Sequence
  Synthetic polynucleotide
ctactctttgtgcccagctctctgcccgtgctgacagccctgctctgtgccgccacctgatgccagatgggagcctcccagaggcccagagcctgtggcccagagcctgtggccaaggccactgttttgctagggccccagggcccacatttgggaaagttcttgatgtaggaaagggtgaaaaagcccaaatgctgctgtggttcaaccaggca

SEQ ID NO: 10481 - DNA, 205 bp, Artificial Sequence
  Synthetic polynucleotide
gccccgttccttcatttcacgttgagctgtgcagagaaggcaagaaccttctgaagcattttcgattccgtgacttggaagaggatccgtacctccctggttggtaatccccgtgaactgattgcctatagccagtatccccggccttcagacatccctcagtggaattctgacaagccgagtttaaaagatataaagatcatgg

SEQ ID NO: 10482 - DNA, 205 bp, Artificial Sequence
  Synthetic polynucleotide
accgatctgatgtgtttgaggcctggcggctgctgctcacatctgctccctccctggccaccagccccgccttccgctacgacctgctggacctcactcgctcggcaggcagtgcaggagctggtcagcttgtactatgaggaggcaagaagcgcctacctgagcaaggagctggcctccctgttgagggctggaggcgtcctgg

SEQ ID NO: 10483 - DNA, 208 bp, Artificial Sequence; identical to SEQ ID NO: 10348
  Synthetic polynucleotide

SEQ ID NO: 10484 - DNA, 221 bp, Artificial Sequence; identical to SEQ ID NO: 10239
  Synthetic polynucleotide

SEQ ID NO: 10485 - DNA, 206 bp, Artificial Sequence
  Synthetic polynucleotide
gggtcttactacggagcacatttgcagtgaattgaggaatttgaatattttgaagaatgtttccgctgaatattcaatctacatcgcttgcgagccttcccttccccttcagcgaacaatgaaatacatgtggccattgtaagtataagacccattcacacctcattattcgatggcaaggcagttcggttaaccagtgtctgaat

SEQ ID NO: 10486 - DNA, 205 bp, Artificial Sequence
  Synthetic polynucleotide
agaaacatacatgataataaagtttctggtccgttgtctggcaattcagctaatcatcatgctgataatcctagacatggttcaagtgaggactacctacctacacatggtgcacaggctaagtagtgacgtatgtaatatattatcattaaggtgataaaatagttctaatatttgtcatataacctagtatttccatttcaaa

SEQ ID NO: 10487 - DNA, 209 bp, Artificial Sequence
  Synthetic polynucleotide
atcttcagcaggctttgttgtgttaagtctcagcacatgttggatgggtggccatccagcggacatctccttcctgttgtttcagatacagccaggctgataggctgatgccctgaagtatgtcggcatcgaaagagaaatggaaatcccttgacatctgctacctcctcccccctcctctgaaacagctgccttagcttcaggaacct

SEQ ID NO: 10488 - DNA, 210 bp, Artificial Sequence
  Synthetic polynucleotide
gcgcccggtaatgaatgtggaggatgaggtgggaggagggacggcagccctgcttctcttctgcccagcttcaaggagcggttccatgccagcgtgcgcagcgtgcgcaggctgacgcccagctgcgagatcaccttcatcgagtcggaggagggcagtggccggggcgcggccctggtctcggcggtggcctgtaagaaggcctgtatg

SEQ ID NO: 10489 - DNA, 206 bp, Artificial Sequence
  Synthetic polynucleotide
ttccacgagggccccagttggctgcccagaacttgggcatcagcctggccaacttgttgctgagcaaaggagccaaaaacatcctggatgttgcacggcacggcagcttaacgatgcccattaactggtttgtggggcacagatgcctgggttgctgctgtccagtgcctacatcccgggcctcagtgccccattctcactgctat

SEQ ID NO: 10490 - DNA, 213 bp, Artificial Sequence
  Synthetic polynucleotide
gtgggtctttcctttgagtgacagttcaatcctgtctcttctgtagtgtctgtcacctgcaaatccggggacttcagctgtgggggccgtgtcaaccgctgcattctgcattcctcagttctggaggtgcgatggccaagtggactgcgacaacggctcagacgagcaaggctgtcgtaagtgtggccctgcctttgctattgagcctatctg

SEQ ID NO: 10491 - DNA, 208 bp, Artificial Sequence
  Synthetic polynucleotide
cacgcactaccacgagcacggctccctctacgactttctgcagagacagacgctggagccccatctggctctgaggctagctgtgtccgcggcatgcggcatgcggcctggcgcacctgcacgtggagatcttcggtacacagggcaaaccagccattgcccaccgcgacttcaagagccgcaatgtgctggtcaagagcaacctgca

SEQ ID NO: 10492 - DNA, 210 bp, Artificial Sequence
  Synthetic polynucleotide
accgaccccggccccatgctggccatccctgccatggccaccaacccccagaacgccgccagccgccggacgcccaacaacccggggaacccatccaatccatccaatcccggcccccccaagacccccgagaatagccttatcgtcaccaaccccagcggcacccagaccaattcagctaagactgccaggaaacccgaccacaccaca

SEQ ID NO: 10493 - DNA, 212 bp, Artificial Sequence; identical to SEQ ID NO: 10283
  Synthetic polynucleotide

SEQ ID NO: 10494 - DNA, 210 bp, Artificial Sequence
  Synthetic polynucleotide
gggggctttggaggtggtgctggaggaggtgatggtggtattctgactgctaatgagaagagcaccatgcaggaactcaattctcggctggcctcttacttctcttacttggataaggtgcaggctctagaggaggccaacaacgacctggagaataagatccaggattggtacgacaagaagggacctgctgctatccagaagaactac

SEQ ID NO: 10495 - DNA, 205 bp, Artificial Sequence
  Synthetic polynucleotide
tgatttttctctattgttttcatctttcaggacactaaaggagactcagccatggtcctctcccaaaggttctgaaggataccttgcagccacctatccatccaactgtcggccagaccagtccccgagccaggaaatccatgagcctggacatggggcaaccttctcaggccaacactaagaagttgcttggttagtttatcta

SEQ ID NO: 10496 - DNA, 205 bp, Artificial Sequence
  Synthetic polynucleotide
gaagagcctccccaccaagcctctttctctctcttccagatatcgatgagtgtcaggatcccgacacctgcagccagctctgcgtgaacctggagggtgggtggctacaagtgccagtgtgaggaaggcttccagctggacccccacacgaaggcctgcaaggctgtgggtgagcacgggaaggcggcgggtgggggcggcctca

SEQ ID NO: 10497 - DNA, 210 bp, Artificial Sequence
  Synthetic polynucleotide
gcggccaaagctggcatgaaccgggtattcctgcagcggctcctgtggctcctgcggctgctgttcccccgggtcctgtgccgggagacggggctgctggggctgctggccctgcactcggccgccttggtgagccgcaccttcctgtcggtgtatgtggcccgcctggacggaaggctggcccgctgcatcgtccgcaaggacccgcgg

SEQ ID NO: 10498 - DNA, 223 bp, Artificial Sequence
  Synthetic polynucleotide
agagccatgaggcagagcatacgcagcctgtacccagtggtgccgagcctctggcggtgccaagcctcacaccacccccacccacagatccactgtgcgacgagctgtgccacgagctgtgccgcacggtgatcgcagccgctgtcctcttctccttcatcgtctcggtgctgctgtctgccttctgcatccactgctaccacaagtttgcccacaagccacc

SEQ ID NO: 10499 - DNA, 211 bp, Artificial Sequence
  Synthetic polynucleotide
cgctcctcagtatacctcctgtcactgtcccttcaggactggagccgggcctcgtctttcttggcttcctcctggtggttgggatggggctggctggggctggctggggccttcctggcccattatgtgaggtgagtagtggaatgaggtaagtaggaagtgagcttgtgccagaaatggaagtctgcagcaaaaacagcaggctgggttc

SEQ ID NO: 10500 - DNA, 205 bp, Artificial Sequence
  Synthetic polynucleotide
tgttctcatcctcttttctatagccaacccaacccgagcaggcggcagagagccgtatccaggctcagcagaagtgatccgggagtccagcagcaccacggacgggtatggtcgttgggatagtagccgctgccgccctgtgcatccttatcctcctctatgccatgtacaagtacagaaaccgggatgaaggctcataccatgt

SEQ ID NO: 10501 - DNA, 219 bp, Artificial Sequence
  Synthetic polynucleotide
acccgtccccgcccgcagggggcgccctgctctggctcagcggacacgcggggactcaggcccagggcgctgcccgggtggccgcggcgctggacgacggcgcggcgctggacgacggctcggcccttggccgcttcgagcggatgctggcggcgcagggcgtggatcccggtctggcccgagccctgtgctcgggaagtcccgcagaacgccggcagc

SEQ ID NO: 10502 - DNA, 209 bp, Artificial Sequence
  Synthetic polynucleotide
gtggaagtggctctcctgcgccttgcggaaggcgtagcagctctggccgtagtcgcggaaggtctgtagatctagctgcgccacgggctgggccgggccgggcagggcagggggctaccaccccgcgccgcagaggggctctctgcgccgtctgagccggagctgggggactcgaacaggtcgcaaatgccggagtctcccgggagcgg

SEQ ID NO: 10503 - DNA, 215 bp, Artificial Sequence
  Synthetic polynucleotide
cggctttctttttggcctcggcggcagcggctgccaccacactccccggctttcggccccgtttcttgggaatggcctgagggtcggcctcagcttttcgcttcctggcttcctgccggggcgtttgatcaccatgacctgggtggatgtggtggccccacccccctcagccttgccccctggcgaagtttgaaaaggcatcttgacaaggagct

SEQ ID NO: 10504 - DNA, 217 bp, Artificial Sequence
  Synthetic polynucleotide
cccctcctcacttctgcctcacagtggccaggtcctgtgccagattgtccctctcaacctccagccgggcgctgttggcggtgagttgatcgagccgcagccgcagctgccgcagctctcgcagctcagcctggtagacgtctgccagcttggtgggctccttggcccgcagctggttcagctcagcagccagcgccttgttttgctgttccaggaa

SEQ ID NO: 10505 - DNA, 209 bp, Artificial Sequence
  Synthetic polynucleotide
cttaagaagggacggggccccacgctgcgcacccgcgggtttgctatggcgatgagcagcggcggcagtggtggcggcgtcccggagcaggaggattccgggattccgtgctgttccggcgcggcacaggccaggtgaggtcgcagccagtgcagtctccctattagcgctctcagcacccttcttccggcccaactctccttccgcag

SEQ ID NO: 10506 - DNA, 209 bp, Artificial Sequence
  Synthetic polynucleotide
cctgggagctgcgcttctcgtaccgcgcgcgctgcgagccgcctgccgtcgggaccgcgtgcacgcgcctctgccgtccgcgcagcgccccctcgcggtgcggtgcggtccgggactgcgcccctgcgcaccgctcgaggacgaatgtgaggcgccgcgtgagtcctgcgttcgaccccaccccgtcccagccggggaccccggcccct

SEQ ID NO: 10507 - DNA, 209 bp, Artificial Sequence
  Synthetic polynucleotide
ccctgaagaagacggcggggaggagtcgggcgccgaggagtccggcccggaagagtccggcccggaggaactgggcgccgaggaggagatggaggccgggaggccgggcggccgcggcccgtgctgcgctcggtgaactcgcgcgagccctcccaggtcatcttctgcaatcgcagtccgcgcgtcgtgctgcccgtatggctcaactt

SEQ ID NO: 10508 - DNA, 206 bp, Artificial Sequence
  Synthetic polynucleotide
cacgcccacaccacccacctgtgcccacagcaaacctctgaggaagagttgtgcaatctgctcaccaacgtgctgttctcggtgacgtggcgtggcgtggcgtggaaggcagcgatgaggctgcctggcgggagcgtggccaggttttctcagtgctcacccagctgggggcctcagccacacttgtgcgcccaccagactgcatc

SEQ ID NO: 10509 - DNA, 204 bp, Artificial Sequence
  Synthetic polynucleotide
gaaagctaaactcacaatcacttctttttcagaaatttggatgaaaactactgccgcaatcctgacggaaaaagggccccatggtgccatacaaccaacaacagccaagtgcggtgggagtactgtaagataccgtcctgtgactcctccccagtatccacggaacaattggctcccacaggtaagcaagggtatgggagctta

SEQ ID NO: 10510 - DNA, 209 bp, Artificial Sequence
  Synthetic polynucleotide
cacgggaggtgagtcccgagctcacggcgtcccccaccgccacagcttaccgcatccacgtgaacttgagcactgtggggattctccgtgctctggactcgtgctctcgggctaccaggtggagctgcgaggccgcacggagctgaaggtgaggcagggccccaacccctcccggaggccccgccctgtcctgaggcaccgcccatccc

SEQ ID NO: 10511 - DNA, 210 bp, Artificial Sequence
  Synthetic polynucleotide
gcagagggcagaggcctagcaactgcccctccccctgcagcagtggtgcgactatcgcctgcgctgggatccgcgagactacgaaggcctgtgggtgctgtgggtgctgagggtgccgtccaccatggtgtggcggccggatatcgtgctggagaacaagtgaggagggggtgcaggcaggggtgtgggggacaaaggacacagggtctg

SEQ ID NO: 10512 - DNA, 214 bp, Artificial Sequence; identical to SEQ ID NO: 9869
  Synthetic polynucleotide

SEQ ID NO: 10513 - DNA, 204 bp, Artificial Sequence
  Synthetic polynucleotide
gtgtggcgaagatggtcaagtcctacctgcagcagcacaacatcccacagcgggaggtggtcgataccactggcctcaaccagtcccacctgtcccaacaacacctcaacaagggcactcccatgaagacgcagaagcgggccgccctgtacacctggtacgtccgcaagcagcgagaggtggcgcagcgtaagtaatgaccct

SEQ ID NO: 10514 - DNA, 208 bp, Artificial Sequence
  Synthetic polynucleotide
ctcgtaaaggaccgcaatgtggccaccccacgagactactactttgctctggcccataccgtgcgcgaccacctcgtggggcgctggatccgcacgcagcacgcagcagcactactatgagaaggaccccaaggtgctgctggggagcctggggtgggggtatgggctgaaggcgctgccagggagctggcgatcttgacttaagtgg

SEQ ID NO: 10515 - DNA, 215 bp, Artificial Sequence
  Synthetic polynucleotide
cactggtgggcgcgggcgccgggggcgcggcggtggctgggctggcagggctgagctggcccggcggcggcgcggcggccccgtggtgcggtggggcaggcggcggtgcggcggtgcggcggccgcgtgcagatggtgtgcgtgcggatgcgggtgggggtgcggcggaggcgggggtgcggccggcgggcctcccaggccattgtacgagttca

SEQ ID NO: 10516 - DNA, 205 bp, Artificial Sequence
  Synthetic polynucleotide
ggctttgggcgccttctggcactgcagctggaccagagaggcttccgagtcctggccagctgcctgaccccctccggggccgaggacctgcagcgggtgggtggcctcctcccgcctccacaccaccctgttggatatcactgatccccagagcgtccagcaggcagccaagtgggtggagatgcacgttaaggaagcaggtaag

SEQ ID NO: 10517 - DNA, 214 bp, Artificial Sequence
  Synthetic polynucleotide
ggccgaggcgcacgcccaggcaaaggcacaggcggagcgggaggcgaaggagctgcagcagcgcatgcaggaggaggtggtgcggcgggaggaggcggcgggaggaggcggcggtggacgcgcagcagcagaagcgcagcattcaggaggagctgcagcagctgcggcagagctcggaggcggagatccaggccaaggcccggcaggcagaggc

SEQ ID NO: 10518 - DNA, 205 bp, Artificial Sequence
  Synthetic polynucleotide
tttggcggacatctcattcttacaggtctgctaggtcctaccatccaggctgaggtttatgatacagtggtcattacacttaagaacatggcttcccatccatcctgtcagtcttcatgctgttggtgtatcctactggaaagcttctgagggtgagtaaaataccctcctattgtcctgtcattctatgaatagaacagtgaga

SEQ ID NO: 10519 - DNA, 220 bp, Artificial Sequence; identical to SEQ ID NO: 9873
  Synthetic polynucleotide

SEQ ID NO: 10520 - DNA, 205 bp, Artificial Sequence
  Synthetic polynucleotide
tcagcttctggggggacagtcggggccgccagtaccaggagctccctcgatgccccgcccccacccccagcctcctcaacatccccctctccagcccgggtgggtcggcggccccggggcgacgtggagagcaggctggatgccctccagcgccagctcaacaggtgagggagtgcaggtggggtgggggggcacgccctggagt

SEQ ID NO: 10521 - DNA, 205 bp, Artificial Sequence
  Synthetic polynucleotide
tctgcttttattttatggttgggataaggctggattattctgagtccaagctaggcccttttgctaatcatgttcatacctcttatcttcctcccacagctagctcctgggcaacgtgctggtctgtgtgctggcccatcactttggcaaagaattcaccccaccagtgcaggctgcctatcagaaagtggtggctggtgtggct

SEQ ID NO: 10522 - DNA, 205 bp, Artificial Sequence
  Synthetic polynucleotide
tcctccgtgcgcaagcgccgagtggtcatcgtggaccccgagacgggcaaggagatgtcagtgtacgaggcctaccgcaagggcctgattgaccaccagacagacgtacctggagctgtccgagcaggagtgcgagtgggaggagatcaccatctcctcctcggacggcgtggtcaagtccatgatcatcgaccgccgctccggg

SEQ ID NO: 10523 - DNA, 209 bp, Artificial Sequence
  Synthetic polynucleotide
ccattgaaactgtgatgctcttctaccctgggctgctcctaacctgtgcccttctctgtccagtcccggcagcagagcccatcgagtatgcccagttccctagttccctttctacctcaacggcttgcgggacacctcagactttgtggaggcaattgaaaaagtaaggaccatctgcagcaactatacgagcctggggctgtccagtt

SEQ ID NO: 10524 - DNA, 204 bp, Artificial Sequence
  Synthetic polynucleotide
agctgggcgtgtggagcggccccgtggtaatctctcttctaccactttttcatgccttgcagcactttgcccatagggaggaaggggaagtgccccagctgctcgctgtacatggcctggctggagaccctgtcccaggacctcagacctccagtcatcctgatccgaggaaaccaggaaaacgtgctcaccttttactgccag

SEQ ID NO: 10525 - DNA, 216 bp, Artificial Sequence; identical to SEQ ID NO: 10010
  Synthetic polynucleotide

SEQ ID NO: 10526 - DNA, 206 bp, Artificial Sequence
  Synthetic polynucleotide
tgctccggggttagcaggtgagcctgcgatgcgcgggaagacgttccgctttgaaatgcagcgggatttggtgagtttcccgctgtctccagcggtgcggtgcgggtgaagctggtgtctgcggggttccagactgctgaggaactcctagaggtgaaaccctccgagcttagcaaaggtaacgactcctgatggcaagctgaggc

SEQ ID NO: 10527 - DNA, 204 bp, Artificial Sequence
  Synthetic polynucleotide
gagtgcatctccgacttcctggacaagcatcagatgaaacacaagaagctgcccctgggcttcaccttctcctttcctgtgaggcacgaagacatcgataataaggtgggccgggtggaggggcagaaggcagatgaggggaggcacaggcaccccagaggaactctgccttcaaatgtagcccccataccatgtgctcagaag

SEQ ID NO: 10528 - DNA, 220 bp, Artificial Sequence
  Synthetic polynucleotide
acctgtcggtggattgtgtgttctgtcctcattgtattgaattgcttgctctctttctcagttaacttaccaagactggttacacctggagctggaaattccacctgaagctggaaattcaacctgaagctgatgctctttcagatactgaacggtaagtgttgaaaagagctaccctggccaggcatgatggctcacacctataatcccagcactttgg

SEQ ID NO: 10529 - DNA, 212 bp, Artificial Sequence; identical to SEQ ID NO: 10230
  Synthetic polynucleotide

SEQ ID NO: 10530 - DNA, 209 bp, Artificial Sequence
  Synthetic polynucleotide
atgtttattttctttcacatccaatgacaaggccttatctctgtctcacctcacagcccccacctctgctcccaaggacttgacagtcattactagggaagggaagggaagcctcgtgccgtcattgtgagttggcagcctcccttggaagccaatgggaaaattactggtaagcatctccactttctctcccagcatagctctccctt

SEQ ID NO: 10531 - DNA, 207 bp, Artificial Sequence
  Synthetic polynucleotide
gctgcggagagggggagagcaggcagcgggcggcggggagcagcatggagccggcggcggggagcagcatggagccttcggctgactggctggccacggccacggccgcggcccggggtcgggtagaggaggtgcgggcgctgctggaggcgggggcgctgcccaacgcaccgaatagttacggtcggaggccgatccaggtgggta

SEQ ID NO: 10532 - DNA, 211 bp, Artificial Sequence; identical to SEQ ID NO: 10288
  Synthetic polynucleotide

SEQ ID NO: 10533 - DNA, 209 bp, Artificial Sequence
  Synthetic polynucleotide
gggtgggggcgggtggcagggcctcttcctcactcatttcattgtcatctgcattcccccagggcttcagtttccacctggctgcggtcctgctgtccctaggaccctggcttttatcacttacgtggagcatggtgagtgcagggcccagcccagccgttggatagaaggttggtgggggggctggagacagcctcccctgaggctaa

SEQ ID NO: 10534 - DNA, 217 bp, Artificial Sequence; identical to SEQ ID NO: 9988
  Synthetic polynucleotide

SEQ ID NO: 10535 - DNA, 208 bp, Artificial Sequence
  Synthetic polynucleotide
ggggagcctgggtctcaccctataccacccgcatgcagatcatggacgagatcaaggaaggcatccagtacgtgttccagaccaggaacccactcacacttcacactggtcatctctggctcgggacactgtgccctggaggccgccctggtcaatgtgctggagcctggggactccttcctggttggggccaatggcatttgggggc

SEQ ID NO: 10536 - DNA, 209 bp, Artificial Sequence
  Synthetic polynucleotide
tgcggagatgagcgggtccctcggccgagctgcggcggctctgctccgctgggggcgcggcgcgggcggcggtggcctttggggtccgggcgtgcgggcgtgcgggcggcgggctcgggcgcgggcggcggcggctcggcggagcagttggacgcgctggtgaagaaggacaaggtggtggtcttcctcaaggggacgccggagcagcc

SEQ ID NO: 10537 - DNA, 205 bp, Artificial Sequence
  Synthetic polynucleotide
tatttttctttgtcagctcgttttgacaggagccattcaagtagcagacaaagtttcttcagggaagagttcagtgcttgtgcattgcagtgacggatggatgggacaggactgctcagctgacatccttggccatgctgatgttggatagcttctataggagcattgaagggttcgaaatactggtacaaaaagaatggataag

SEQ ID NO: 10538 - DNA, 213 bp, Artificial Sequence
  Synthetic polynucleotide
ccccagcttttaggaaagccatggtcccttgggcagtatacctcctctctccatggcctctttgttcataacgagggtgtattcataaatgcccccaagcacagcccacagcctctgtgatgtagtgggtcccaaaatcacggaagagatctctgtattccccgtagctgtactccaggggcagccgcttaactctctgaaggaactcgtaat

SEQ ID NO: 10539 - DNA, 210 bp, Artificial Sequence
  Synthetic polynucleotide
gccttgtgtcgcagacggtgaccagtgcttggtcttgcccttggagcacccgtgcgccagcctgtgctgcgggcacggcacgtgcatcgacggcatcggcggcatcggcagcttcagctgcgactgccgcagcggctgggagggccgcttctgccagcgcggtgagggggagaggtggatgctggcgggcggcggggcggggctggggcc

SEQ ID NO: 10540 - DNA, 208 bp, Artificial Sequence
  Synthetic polynucleotide
gacgtgacggcgtccgcgcttcagggtctgcacatcgcggtccacgagtgtcagcaccagctgcgcgaccagcgctggaactgctccgcgcttgagggcggagggcggcggccgcctgccgcaccacagcgccatcctcaagcgcggtgagcctggctgggcgggtcggcgctgccgcggaggctagggggtgggcggcagggcgagg

SEQ ID NO: 10541 - DNA, 208 bp, Artificial Sequence; identical to SEQ ID NO: 10422
  Synthetic polynucleotide

SEQ ID NO: 10542 - DNA, 208 bp, Artificial Sequence
  Synthetic polynucleotide
tgtccaggtaggccccaacagtttctcttgtctggcaggtcttctattactccacgagcatcttcgagaaggcgggggtgcagcagcctgtgtatgccaccggataccattggctccggtatcgtcaacacggccttcactgtcgtgtcggtgagtctttgcttactggcccccccagccaaaccccagggaggaggcagtgccatct

SEQ ID NO: 10543 - DNA, 205 bp, Artificial Sequence
  Synthetic polynucleotide
tttcttaggaagttatccctatgcacctggccacctcccccatcctgtcagaaggagcttcgagaatggaatgccagctgaaaaggggctctgtggacagacaggatgagaggcctggaccccagcacgccagcccaagtgatcgctcccagcgagacgccgtcaagcagctctgtagtaaagaagagaagaaaaaggaggagaa

SEQ ID NO: 10544 - DNA, 204 bp, Artificial Sequence
  Synthetic polynucleotide
ggcaatttttctttccgagtttatgatttcccaagaataaattaccatgtgccattcatccttcatcccacgcaggctccatcgaagactggtgcccaccacctacgagagcgcgtccatccgccgattccaggagggacgcgtggacaacatcagatcggccactccagaggcactggcttttgtgagagccgtgactgacca

SEQ ID NO: 10545 - DNA, 223 bp, Artificial Sequence
  Synthetic polynucleotide
ccaaggggacagtagcccctgctcggccttcgagttccactgcctaagtggcgagtgcatccactccagctggcgctgtgatggtggccccgactgcaaggacaaatctgaggacaaatctgacgaggaaaactgcggtatgggcggggccagggtgggggcggggcgtcctatcacctgtccctgggctcccccaggtgtgggacatgcagtgatttaggtg

SEQ ID NO: 10546 - DNA, 217 bp, Artificial Sequence; identical to SEQ ID NO: 9926
  Synthetic polynucleotide

SEQ ID NO: 10547 - DNA, 209 bp, Artificial Sequence
  Synthetic polynucleotide
ccgggcctcaagagagtgggtgtctccggaggccatgggctacccggaggtggagcgcagggaactcctgcctgcagcagcgccgcgggagcgagggagcgagggagccagggctgcgggtgtggcggggcccctgcccgggcgggcgaagggaacagctgcctgctcttcctgggtttctttggcctctcgctggccctccacctgct

SEQ ID NO: 10548 - DNA, 215 bp, Artificial Sequence; identical to SEQ ID NO: 10042
  Synthetic polynucleotide

SEQ ID NO: 10549 - DNA, 227 bp, Artificial Sequence; identical to SEQ ID NO: 9909
  Synthetic polynucleotide

SEQ ID NO: 10550 - DNA, 214 bp, Artificial Sequence
  Synthetic polynucleotide
acccccactgagaggggaggccaggctgcccccagctcccccattcaggctctcaactgaaggccaagccccccaagaagccggagagcagcgcagagcaccagcgcagagcagcagcgccttccactcgggaacggtgagcggggcccagtgggagcgcctcccttctccctggccaggggcaaggggtcaggggtcagagcagggcctgccc

SEQ ID NO: 10551 - DNA, 205 bp, Artificial Sequence
  Synthetic polynucleotide
atccacccaggtcatggtgatcaaacgccccggcaggaagcgaaaagctgaggccgaccctcaggccattcccaagaaacggggccgaaagccggggagtgagtgtggtggcagccgctgccgccgaggccaaaaagaaagccgtgaaggagtcttctatccgatctgtgcaggagaccgtactccccatcaagaagcgcaagac

SEQ ID NO: 10552 - DNA, 209 bp, Artificial Sequence
  Synthetic polynucleotide
ttccagccgcgggccttccacgcgctctgcctgggcagcggcgggctccgcttggcgctgggccttctgcagctgctgcccggccgccggcccgcgggcccgcgggccccgggtcccccgcgacgtccccgccggcctcggtccgcatcctgcgcgctgccgctgcctgcgaccttctcggctgcctgggtaagggcgcgcgcggcccg

SEQ ID NO: 10553 - DNA, 207 bp, Artificial Sequence
  Synthetic polynucleotide
tgctggaagccttcaaaaacattacttccagttccccggaaagacatatttttggagaggacagagttgtctctgagcagcctcaagtgggcacacttgaagaaagaaaggaatgacgtcgtggaagcactgacaggcagtgcagcctcgaggctccgcgggggcacttcctccagacgcctctcttccacaccccttccaaaagca

SEQ ID NO: 10554 - DNA, 207 bp, Artificial Sequence
  Synthetic polynucleotide
agatgtgtccattctccatgtcttcatcagacctcactctgcttgtactccctccctcccaggtgcccgcccctgcatccctaaaagcttcggctacagctacagctcggtggtgtgtgtctgcaatgccacatactgtgactcctttgaccccccgacctttcctgcccttggtaccttcagccgctatgagagtacacgcagtgg

SEQ ID NO: 10555 - DNA, 210 bp, Artificial Sequence
  Synthetic polynucleotide
aacagatatgctgtttcattatttgctggttaattccttggtttaatttcctcttttagggtgaaattggagctgttggtaacgctggtcctgctggtcctgctggtcccgccggtccccgtggtgaagtgggtcttccaggcctctccggccccgttggacctcctgtaagtagccactgtctttaaactttattgagtaaaagaaaac

SEQ ID NO: 10556 - DNA, 219 bp, Artificial Sequence
  Synthetic polynucleotide
cagatggtggccgcgctgaagtctcagccggcccagccagtgaacgtggggctggtggactggatcaccctggcccacgaccactacaccatcgccgtccactacaccgtcgccgtccgcaacacccgccttgtgggcaaggaggtcgcggctcttctccggtggctggaggtaccgacctgccccatccttccttcacctcccttccctcctttccct

SEQ ID NO: 10557 - DNA, 205 bp, Artificial Sequence
  Synthetic polynucleotide
gaaggcacagattcgggccaatggcttcaagctggagacagggcccccgatgggggtgcccccgccgccccctcccgcaccggactacgtgctgcctcccacccagcctgcatgggcctgagcccaagggcctggccgccggtccacctgctgggccactgggcgactttggggccccagcactgcccatggccgtgcccggtgc

SEQ ID NO: 10558 - DNA, 212 bp, Artificial Sequence; identical to SEQ ID NO: 10312
  Synthetic polynucleotide

SEQ ID NO: 10559 - DNA, 206 bp, Artificial Sequence
  Synthetic polynucleotide
gggcacacctttcccaccctgctcaggcaatgtccctttctcctttcagtcgggaggcaagatcagctcggcgctgcatttctgccgggccgtgtgccgccccgccgggccgagagacggtaagagggctggagagagggagagggcccaagggagagggagaggaacaagggggaggggggagggagagggagaggaggacggag

SEQ ID NO: 10560 - DNA, 206 bp, Artificial Sequence
  Synthetic polynucleotide
tcggggccgccagtaccaggagctccctcgatgccccgcccccacccccagcctcctcaacatccccctctccagcccgggtcggcggccccggggcgacgcgacgtggagagcaggctggatgccctccagcgccagctcaacaggtgagggagtgcaggtggggtgggggggcacgccctggagtctggtccaggtcctggcgg

SEQ ID NO: 10561 - DNA, 204 bp, Artificial Sequence
  Synthetic polynucleotide
ctggggggacagtcggggccgccagtaccaggagctccctcgatgccccgcccccacccccagcctcctcaacatccccctctccagcccgggtcggcggcggccccggggcgacgtggagagcaggctggatgccctccagcgccagctcaacaggtgagggagtgcaggtggggtgggggggcacgccctggagtctggtcc

SEQ ID NO: 10562 - DNA, 218 bp, Artificial Sequence; identical to SEQ ID NO: 10008
  Synthetic polynucleotide

SEQ ID NO: 10563 - DNA, 205 bp, Artificial Sequence
  Synthetic polynucleotide
tgaggagtatgtcgcctgcctccctgacaacagctcaggcaccgtggcagcagtgtccttttcagctgcccacgaaggcctgcttcagccagaggcctgcatgcagcgccttctgcttctccaccggccagggcctcgcagccctctcggagcagggctggtgcctgtgtggggcggcccagccctccagtgcctcctttgcctg

SEQ ID NO: 10564 - DNA, 204 bp, Artificial Sequence
  Synthetic polynucleotide
acgcagtgctcccccggcccaggcttcctgaactactacgatgcctgctcggagggtctgcgcgccgccagccccgccctgcggctgggaggccccggcggcgactccttccacaccccaccgcgatccccgctgagctggggcctcctgcgccactgccacgacggtaccaacttcttcactggggaggcgggcgtgcggctg

SEQ ID NO: 10565 - DNA, 205 bp, Artificial Sequence
  Synthetic polynucleotide
ccctgagcaatggcggctgccagtatctgtgcctccctgccccgcagatcaacccccactcgcccaagtttacctgcgcctgcccggacggcatgctgcttgctggccagggacatgaggagctgcctcacaggtgtggcacacgccttgtttctgcgtcctgtgtcctccaactgccccctcctgagcctctctctgctcatct

SEQ ID NO: 10566 - DNA, 209 bp, Artificial Sequence
  Synthetic polynucleotide
gcttcatcttcactgagttcctggagccggcagccaatgagaccgtgcggcacgggtgtctgcgcctcaaccagcccacccacgtcaacaacggcaactaggcaactacacgctgctggctgccaaccccttcggccaggcctccgcctccatcatggctgccttcatggacaaccctttcgagttcaaccccgaggaccccatccctg

SEQ ID NO: 10567 - DNA, 206 bp, Artificial Sequence
  Synthetic polynucleotide
atgagaaaactactatgacttctaaattacgaaaaaatgttaaaaagtcataatgtttttcttttcaggacatgtgaacttatatatttgacacaacccaacccagcagttcgtaagtagttcacagaatgttatttttcacttaaaaaaaaagatttttatggaataatctcaaacatcttgatagttagggttagtttgatcga

SEQ ID NO: 10568 - DNA, 205 bp, Artificial Sequence
  Synthetic polynucleotide
gatatattttcacctttccctcccactggcagaaaaccctactcagtcaccatggtgttcacagtatcgcagacagctactgaagtccctaccagagttagttaagtgcctctgcagagttgtgtatagaagacagaccaatgcctaagttggaaattgagaaggaaattgaattaggtaagtaccattgaactcatgtcctctg

SEQ ID NO: 10569 - DNA, 210 bp, Artificial Sequence
  Synthetic polynucleotide
cgcgctgcgcggcctggccaacctgacgcacgcgcacctggagcgcggccgcatcgaggcggtggcctccagctcgctgcagggcctgcgccgcctgcgccgcctgcgctcgctcagcctgcaggccaaccgcgtccgtgccgtgcacgctggcgccttcggggactgtggcgtcctggagcatctgctgctcaacgacaacctgctggc

SEQ ID NO: 10570 - DNA, 204 bp, Artificial Sequence
  Synthetic polynucleotide
ttcctccttcctcttccctcctccctctgcagtttcttagcgaggttgggctgttcatcatgtctggactatttcacgacccaggggctgaccaccatcttctatcagattgagcattactccatggatgtaagtaactgttagacttttctcaaattttatttcttcatttctttcctctgatgacaaccgccttgtagttca

SEQ ID NO: 10571 - DNA, 207 bp, Artificial Sequence
  Synthetic polynucleotide
accctaatgtaaaagtccccctgcgagtttccagcacggatctgaaaggcattgtaggcaccggggtagacggaggtcgcctggatctggaacacgtcagcgggcgggcacgctccgctccgaggtgatggtcatgtagcggtgcacaatggatgaaggctgctctcgacatagagggttggaggccgggcagagacagcggctaga

SEQ ID NO: 10572 - DNA, 206 bp, Artificial Sequence
  Synthetic polynucleotide
tcttgtgggtgtaaacggctttcaaccccaacctgtccagaggcctctggatcagtttgtgctgcagtcgcacgcatggttcaacgtgtcctccctcccctcccctatgcggtgcccccgctcagcctgccccgaggggaagctcaggtgagtgtggggggatggagcagagaccagtcctgcaggacccattgtcccccagtcag

SEQ ID NO: 10573 - DNA, 216 bp, Artificial Sequence
  Synthetic polynucleotide
tagcccctgctcggccttcgagttccactgcctaagtggcgagtgcatccactccagctggcgctgtgatggtggccccgactgcaaggacaaatctgacaaggacaaatctgacgaggaaaactgcggtatgggcggggccagggtgggggcggggcgtcctatcacctgtccctgggctcccccaggtgtgggacatgcagtgatttaggtgcc

SEQ ID NO: 10574 - DNA, 217 bp, Artificial Sequence
  Synthetic polynucleotide
cgaggcctcctgcccggtgctcacctgtggtcccgccagcttccagtgcaacagctccacctgcatcccccagctgtgggcctgcgacaacgaccccgactgcgaagactgcgaagatggctcggatgagtggccgcagcgctgtaggggtctttacgtgttccaaggggacagtagcccctgctcggccttcgagttccactgcctaagtggcgag

SEQ ID NO: 10575 - DNA, 204 bp, Artificial Sequence
  Synthetic polynucleotide
gggggagtccctggagggcccgggccgcgctgacctcgcgtccctccgcaggagattccccggagcacgctggactcgttcatgcagccgttccagagcagcacactgtggctgctggtggggctgtcggtgcacgtggtggccgtgatgctgtacctgctggaccgcttcaggtgagcgcgacccggggctcagacacctcca

SEQ ID NO: 10576 - DNA, 205 bp, Artificial Sequence
  Synthetic polynucleotide
cccacaggccctccagtgggtccgctctccctggggctggcgacagtggacatccagaaccctgacatcacgagttcacgataccgtgggctcccagcacgcacctggacctagcccagctgataagaaacgctcagggaagaagaagatcagcaaagctgatattggtgcacccagtggattcaagtgagagccactccccagt

SEQ ID NO: 10577 - DNA, 204 bp, Artificial Sequence
  Synthetic polynucleotide
cttctgcaatcgcagtccgcgcgtcgtgctgcccgtatggctcaacttcgacggcgagccgcagccctacccaacgctgccgcctggcacgggccgccgccgcatccacagctaccgaggtacgggcccggcgcttaggcccgacccagcagggacgatagcacggtctgaagcccctctaccgccccggggtccattttgcag

SEQ ID NO: 10578 - DNA, 211 bp, Artificial Sequence
  Synthetic polynucleotide
gaacccgccctgcactgctgtctgggcgggtccggggactcagcactcgacccaaaggtgcaggcgcgcgagcacaacccatggctgcgctgggctgcgctgggctgcgcgaggctgaggtgggcgctgcgaggggccggccgtggcctctgcccccacggggccagagccaaggccgcgatccctgccgccctcccctcggacaaggcca

SEQ ID NO: 10579 - DNA, 209 bp, Artificial Sequence
  Synthetic polynucleotide
gcacgcgtgcctgcctggcagcccctcacccaggtgctccctgcaggtcctgcctgactacctgaagggactcttcagcagtgtgccggccagccggcccgccggcccagcgagcagctgctgcagcaggtgtccaagctggcttcactgcagcatcgcgccaaggaccacttctacctgccgagcgtgtgagcatctgccctcctgcc

SEQ ID NO: 10580 - DNA, 209 bp, Artificial Sequence
  Synthetic polynucleotide
cactctggctcccaccttttcggcttcccacccacgccacccaaagaagtgtctcctgaccctagcaccacgggggctgcgtctccagcctcatcttccgctcttccgcggggggtagtgcagcccgaggagaggacaaggacggcgtcaagtaccaggtgtcactgacggagagcatgaagatggaaagtggcagtcccctgcgccca

SEQ ID NO: 10581 - DNA, 212 bp, Artificial Sequence
  Synthetic polynucleotide
tggactgcaccatgggccgctgtgcctgggagagcctgctcccttttggaggggcgtcctgagcaccccagactcctggcttccccctggcttcccccaggcttcccccagggccccaaggacatgctcccacttgtggagggcgagggcccccagaatggggagaggaaggtcaactggctgggcagcaaagagggactgcgctggaagga

SEQ ID NO: 10582 - DNA, 209 bp, Artificial Sequence; identical to SEQ ID NO: 10552
  Synthetic polynucleotide

SEQ ID NO: 10583 - DNA, 206 bp, Artificial Sequence
  Synthetic polynucleotide
tctgagccgcagcaaatgggctccgacgtgcgggacctgaacgcgctgctgcccgccgtcccctccctgggtggcggcggcggctgtgccctgcctgtgaggggagcggcgcggcgcagtgggcgccggtgctggactttgcgcccccgggcgcttcggcttacgggtcgttgggcggccccgcgccgccaccggctccgccgcca

SEQ ID NO: 10584 - DNA, 205 bp, Artificial Sequence
  Synthetic polynucleotide
aacaatacagggatgaatcaaaatttaggccttacaaataatactccaatgaatcagtccgtaccaagataccccaatgctgtaggattcccatcaaacaaacagtggtcaaggactaatgcaccagcagcccatccaccccagtggctcacttaaccaaatgaacacacaaactatgcatccttcacagcctcagggaacttat

SEQ ID NO: 10585 - DNA, 212 bp, Artificial Sequence
  Synthetic polynucleotide
agtggtgaagcccctgctggtgtccaccctcggtgagaagagcgggaaaggactgaagacctgtaagagccctgggcggaaaagcaaggagagcagccccagggtggccccaaggggcgcagcagcagcgcctcctcaccccccaagaaggagcaccaccaccatcaccaccactcagagtccccaaaggcccccgtgccactgctcccacc

SEQ ID NO: 10586 - DNA, 208 bp, Artificial Sequence; identical to SEQ ID NO: 10422
  Synthetic polynucleotide

SEQ ID NO: 10587 - DNA, 204 bp, Artificial Sequence
  Synthetic polynucleotide
ggaatccccaagtagttagtgttgcattgtctgctgccgtccagagcccagaacgcttcctccagcttggcgccaaggtcccaaagggcgcactgctgctgctcggcccccccggctgtgggaagacgctgctggccaaggcggtggccacggaggctcaggtgcccttcctggcgatggccggcccagagttcgtggaggtca

SEQ ID NO: 10588 - DNA, 204 bp, Artificial Sequence
  Synthetic polynucleotide
tgtgcagccacaaagcagagcctcagatgctagcttccgcctctgtctctagggtccagaaggccctgtcctgacgcctcctctcctcgcaggagtctgatgactggaaggtgctgaagctggttctgggcaggctgcctgagtccctgcgctataaagtgctcatctttacttccccttgcagtgtggaccagctgtgctctg

SEQ ID NO: 10589 - DNA, 204 bp, Artificial Sequence
  Synthetic polynucleotide
tcaaataggatcatggacttcttggaggagccaatccctggtgtagggacctatgatgatttcaatacaattgattgggtgagagagaagtctcgagaccaccgggataggcaccgagaggtaagacaaaagatggcacatgggtaagtgttaggaaatacaggggaagaaattgaagatacatattctttctattctttcctt

SEQ ID NO: 10590 - DNA, 211 bp, Artificial Sequence
  Synthetic polynucleotide
gtgtggagaggagatgggaaagttgcgggggacctgggaggcggctgaccccaaggtatgtgcaggactgccaagcggggctgaactttgcagacgaggacgaggacgaggcccaggccttccgggccctcgtgcaggagaagatacaaaaaaggaatcagaggcaaagtggaggtgaggaggccacaggggaggaaaggaagttgggcag

SEQ ID NO: 10591 - DNA, 205 bp, Artificial Sequence
  Synthetic polynucleotide
ggacacagctgggaagccagttgggggttgggggagtgccccaggcagggcccacccgtctccctgggctaactcccctgcctcacccatacccccacagtagtaccctggcgtggcccagagcatcaacagtgatgtcaacaacctcatggccgtgttgaacatgagcaacatgcttccagaaggtctgaggctaggtggttgg

SEQ ID NO: 10592 - DNA, 209 bp, Artificial Sequence
  Synthetic polynucleotide
ctccagtctcaacagcctgaataacttgaacaacctgagtagcccgtcgctgaattccgcggtgccgacgcctgcctgtccttacgcgccgccgactcctcgactcctccgtatgtttatagggacacgtgtaactcgagcctggccagcctgagactgaaagcaaagcagcactccagcttcggctacgccagcgtgcagaacccggc

SEQ ID NO: 10593 - DNA, 210 bp, Artificial Sequence
  Synthetic polynucleotide
cggcgggggcgacggcgcgggttgtggcggccgcaggccgggccctgcgaggcctcagctaccgcagcctgcggcggcgcgtgcggcggctgcggcggctgcggcggcttacggcccgcgaggcggccaccgcagtggcggcgctgctctgggcagcagtgacgcgcgctggggccgctggcgcgggggcggcggcgggcgcgctgggcc

SEQ ID NO: 10594 - DNA, 209 bp, Artificial Sequence
  Synthetic polynucleotide
aacaacggcggctgttcccacgtctgcaatgaccttaagatcggctacgagtgcctgtgccccgacggcttccagctggtggcccagcgaagatgcgaagatgcgaaggtgatttccgggtgggactgagccctgggccccctctgcgcttcctgacatggcaaccaaacccctcatgcctcagtttccccatctgttaagtgtgcttg

SEQ ID NO: 10595 - DNA, 207 bp, Artificial Sequence
  Synthetic polynucleotide
tccatcatgtatgcgacaaggaggctaaccccatgctcttgttccctcaggtaccctcacatccatcaccaacctcgccacaagcctggcccggaacatggacggaccggctctcactggatgaggagcactacaaccggcaggaggagtggcggcggcagctccccgagagcctgggcgaggggcttcgacagggcctgtcccggc

SEQ ID NO: 10596 - DNA, 206 bp, Artificial Sequence
  Synthetic polynucleotide
cagctgaccgttaaaagacaaggactctattatatctatgcccaagtcaccttctgttccaatcgggaagcttcgagtcaagctccatttatagccagcccagcctctgcctaaagtcccccggtagattcgagagaatcttactcagagctgcaaatacccacagttccgccaaaccttgcgggcaacaatccattcacttggga

SEQ ID NO: 10597 - DNA, 221 bp, Artificial Sequence
  Synthetic polynucleotide
cccagatcttcaggtttctgcgatgcagcaccagacagtgctggaactgacagagactggggtggaggcggctgcagcctccgccatctctgtggcccgcccgccatctctgtggcccgcaccctgctggtctttgaagtgcagcagcccttcctcttcgtgctctgggaccagcagcacaagttccctgtcttcatggggcgagtatatgaccccagggc

SEQ ID NO: 10598 - DNA, 212 bp, Artificial Sequence
  Synthetic polynucleotide
cgcgggggacgcaagcggcgcagcagcaggcgcagcgcgggcggcggcgcggggcccggcggagccgcgggtgggggcgtcggaggcggcgacgagccggggacgagccgggcagcccggcccagggcaagcgcggcaagaagtctgcgggctgtggcggcggcggcggcgcgggcggcggcggcggcagcagcagcggcggcgggagtccg

SEQ ID NO: 10599 - DNA, 207 bp, Artificial Sequence
  Synthetic polynucleotide
tctccatcccctgctgcgggggaccgcgcaagcgcagtgagtactgcacgttgtcgcgggccagtaacgtcatcagacgtgtgtgtgtccctgcggcgctaagtaagaaggggagactgaggctgaggctggggaacatcgggcagcatgagcggctgcgggctcttcctgcgcaccacggctgcggctcgtgcctgccggggtctg

SEQ ID NO: 10600 - DNA, 206 bp, Artificial Sequence
  Synthetic polynucleotide
gggaagagctgtggcctccgcaacctcctactcacttccgctccgttctcttgcccgccctgcagcggcacccgacctgacagcgttcagcgacccgcgccgcgccagttccccgcgctgccctccatctccgacccccgcatgcactatccaggcgccttcacctactccccgacgccggtcacctcgggcatcggcatcggcat

SEQ ID NO: 10601 - DNA, 206 bp, Artificial Sequence
  Synthetic polynucleotide
cccactcctaggtttctggtgagcttcatggttgacgcccggggtggttccatgagaggaagtcgccacaacggcctgcgagtggtgatcccgccacggaccggacgtgcgcagcgcccacccgcatcacctgccgcctggtcaagccccagaagctcagcacgccgcccccactggccgaggaggagggcctggccagcaggatc

SEQ ID NO: 10602 - DNA, 205 bp, Artificial Sequence
  Synthetic polynucleotide
ggtcctgaccttggctggggggcaccccctgggtgtaagtggtggttttcttgagcgtgtactggcgcccgcaggcctcatcctcctccatgatgcccttgctgctgctgacggagggcacgcaggtgttggcgcccgagtggatacccgagtcgtaggtgtatgtctgctgccactcagtcaccttgataggctgctccatcag

SEQ ID NO: 10603 - DNA, 211 bp, Artificial Sequence
  Synthetic polynucleotide
aggtccctgtcccccggcccccacaccggctcccccaacgccaggagaaaagccattgcctccagggatggggatgaagcctgtccctcctgggccatagccattgccattgccattgccacttggggcaaagccatttcccccagtgcctccaggtctggaaccagcactccctggaattcctcccattggaagtccatccatgcaaagt

SEQ ID NO: 10604 - DNA, 216 bp, Artificial Sequence
  Synthetic polynucleotide
gtgtcttccaggcatgggcatccagtggcgagacctcctgagtcccgtcaacgtggacgacgacttctgcttcgggcaggtgctggggatgctgctgctggggatgctgctgctggactctgtgctctatggcctggtgacctggtacatggaggccgtcttcccagggcagttcggcgtgcctcagccctggtacttcttcatcatggtgagttc

SEQ ID NO: 10605 - DNA, 209 bp, Artificial Sequence
  Synthetic polynucleotide
gaaaagggccccagagggttcccgcctcaaaacctcggaggcaccgtgctgaggagggccgcgggcgggtccactggcccagcgccgcctcacttcctgggcccggcccggcccagcccacgtcaccaaagggaccctcgccggtggccgagcgtggcgggggcccgcacggggtacagaggtcggagtcggtgtctgactctccctcc

SEQ ID NO: 10606 - DNA, 217 bp, Artificial Sequence
  Synthetic polynucleotide
gagccagcgaacccagcgaggaagtgaacaaggcctctggccccagggcctgtccccccagccaccacaccaagctgaagaagacatggctcacacggcacatggctcacacggcactcggagcagtttgaatgtccacgcggctgccctgaggtcgaggagaggccggttgctcggctccgggccctcaaaagggcaggcagccccgaggtccagg

SEQ ID NO: 10607 - DNA, 204 bp, Artificial Sequence
  Synthetic polynucleotide
tacggtagagacccgcggcaccgcgcgcggcttccagcctcccgaaggtggcttcggctgggtggtggtgttcgctgccacctggtgcaacggctccatcatcttcggcatccataactctgtcgggatcctctactccatgctgctagaggaggaaaaggaaaaaaatcgccaagtggagttccaagcaggtgagtggccccg

SEQ ID NO: 10608 - DNA, 201 bp, Artificial Sequence
  Synthetic polynucleotide
tccgcccccgtagccgccgccggagcttccgccgccggagcttccgcctccgtagccgccgccggaactgccgccgtggccgccgccgtggccgccgccgggagcttccgccgccggagcttccgccgccgtagccgccgccgaaacttccgccgccgcgtccgccgcctccggaactaaacggggtgaggtcacattcgg

SEQ ID NO: 10609 - DNA, 208 bp, Artificial Sequence
  Synthetic polynucleotide
gtgataaggtctatgcccaccagatggttcgtacagattcccgggaacagaagcttgatgcatttctgcagcctctgagcaaacccctgtccagtcagccgtcagccccaggccattgtcacagaggataagacagatatttctagtggcagggctaggcagcaagatgaggagatgcttgaactcccagcccctgctgaagtggctg

SEQ ID NO: 10610 - DNA, 212 bp, Artificial Sequence; identical to SEQ ID NO: 10414
  Synthetic polynucleotide

SEQ ID NO: 10611 - DNA, 211 bp, Artificial Sequence
  Synthetic polynucleotide
tccccatcccctcctcacttctgcctcacagtggccaggtcctgtgccagattgtccctctcaacctccagccgggcgctgttggcggtgagttgatcgagccgcagccgcagccgcagctctcgcagctcagcctggtagacgtctgccagcttggtgggctccttggcccgcagctggttcagctcagcagccagcgccttgttttgct

SEQ ID NO: 10612 - DNA, 221 bp, Artificial Sequence
  Synthetic polynucleotide
cgagctcgggctgccgggcacaagcgaactgcaggcccggcgcactggtgggcgcgggcgccgggggcgcggcggtggctgggctggcagggctgagctggcccggcggcggcccggcggcggcgcggcggccccgtggtgcggtggggcaggcggcggtgcggcggccgcgtgcagatggtgtgcgtgcggatgcgggtgggggtgcggcggaggcgggg

SEQ ID NO: 10613 - DNA, 206 bp, Artificial Sequence
  Synthetic polynucleotide
attttggttccagaccaacatgatcccgggctcccccggcagtacggagttagagggtggcttcagtcggcaacgcaagcgcaagttgtccttccgcaggccaggcgcacggacaagggtgaggcgggggaggggaggaagggggagggcggggacaaggtgaggctgggagctggaaggcggggtgggccgtgtctgctttaccc

SEQ ID NO: 10614 - DNA, 205 bp, Artificial Sequence
  Synthetic polynucleotide
tgcacaacaaggagctcatggcctccctggcagaaagcagctttgatgtcatgctgacggaccctttccttccttgcagccccatcgtggcccagtacctacctgtctctgcccactgtattcttcttgcatgcactgccatgcagcctggaatttgaggctacccagtgccccaacccattctcctacgtgcccaggcctctct

SEQ ID NO: 10615 - DNA, 207 bp, Artificial Sequence
  Synthetic polynucleotide
caaggcccagttagacgcagctgtgaccttcggccccagccaggtggcccggggcgaggaccccgccctgcagatctgctgtcatcctggctgcaccccccccccccgcccagcttgctgccattgcccagatccccatgcctgagggcccctcggctggcctgggcatgtgatggctcctcactgggagcctgtgggggaggctca

SEQ ID NO: 10616 - DNA, 205 bp, Artificial Sequence
  Synthetic polynucleotide
agctgcacgcgggcagccggcgagcgacacagacggcctggacagcgtagaggccgccgcgccgccacccatcctcagcagctcggtggagtggagcactcacttcgggcgagcgctcggccagtgcccgtttccccgccaccggcccgggctccagcgatgacgaggacgacgacgaggacgagcacggtggcgtcttctccca

SEQ ID NO: 10617 - DNA, 212 bp, Artificial Sequence; identical to SEQ ID NO: 9960
  Synthetic polynucleotide

SEQ ID NO: 10618 - DNA, 204 bp, Artificial Sequence
  Synthetic polynucleotide
gtctgcctcctcaaggcccggcagaagatcgccgtcaagatggtgcacgctgacatctccatcaacatgagcaagcacaccacgttctttggggccatcatcaggctgggtgaagcccctgcatcctagattccccccattttgcctctgtccgtgccccttccctgggtttgggagccaggactcccagaacctctaagtgct

SEQ ID NO: 10619 - DNA, 206 bp, Artificial Sequence
  Synthetic polynucleotide
ttgtatgatattagaattcaggtgcggggcctccccagtttgggcgggactcacactcttttgcccaatagggtgatgttgggagtgcaggactaaagggtagggtgacaaggtgagtgtgggcatggggagggcagggcaggggccagggtgctcccgactcctctgattcctgcctgccccctcagggagactcagctgtgatc

SEQ ID NO: 10620 - DNA, 204 bp, Artificial Sequence
  Synthetic polynucleotide
agtagcaggttttcttttcaggcaagaagacgtcccgtcaccccctgcaccaggacctgcactatttccccttcaggcccagcgatctcatcgtttgcgccgcctggacggcgatggagcacatcagccggaacaacggctgtctggttgtgctcccaggcacacacaagggctccctgaagccccacgattaccccaagtggg

SEQ ID NO: 10621 - DNA, 205 bp, Artificial Sequence
  Synthetic polynucleotide
gcaagagaaggggaggcggggtaagggaagtaggtggaagattcagccaagctcaaggatggaagtgcagttagggctgggaagggtctaccctcggccggccgccgtccaagacctaccgaggagctttccagaatctgttccagagcgtgcgcgaagtgatccagaacccgggccccaggcacccagaggccgcgagcgcagc

SEQ ID NO: 10622 - DNA, 217 bp, Artificial Sequence
  Synthetic polynucleotide
cagccccctgtgaccctgcttgtctgccacctgcagatgtggccgaggaggcgggctgccccctgtcctgtgcagtcagcaagagacggctggagtgtgaggagtgtgaggagtgtggcggcctgggctccccaacaggcaggtgtgagtggaggcaaggagatggcaaaggtaagccctggaaacgcccaagggaggcctgcaggggcgatggcac

SEQ ID NO: 10623 - DNA, 205 bp, Artificial Sequence
  Synthetic polynucleotide
agtgacaggcctcacccccacaggcctggctgtgatgcactcacagggcagcgattacctggacatcggcaacaacccgagagtgggcaccaagcggtacgtacatggcacccgaggtgctggacgagcagatccgcacggactgctttgagtcctacaagtggactgacatctgggcctttggcctggtgctgtgggagattgc

SEQ ID NO: 10624 - DNA, 208 bp, Artificial Sequence
  Synthetic polynucleotide
ctgtggccctgagcaatggcctggtgctggcggccctagctcggcggggccggcggggccactgggcacccatacacgtcttcattggccacttgtgccttgtgcctggccgacctggccgtggctctgttccaagtgctgccccagctggcctggaaggccaccgaccgcttccgtgggccagatgccctgtgtcgggccgtgaagt

SEQ ID NO: 10625 - DNA, 205 bp, Artificial Sequence
  Synthetic polynucleotide
cacagagtttgctagccctggagctgcctccatccctgttcccaggcccagagaaatcccagttggtttctggggaggccacggtggctgagctggatggatggactggagccagatactgagtatacggtgcatgtgagggcccatgtggctggcgtggatgggccccctgcctctgtggttgtgaggactggtgagtggaccc

SEQ ID NO: 10626 - DNA, 205 bp, Artificial Sequence
  Synthetic polynucleotide
gtgatgacgatggacagggtgacgaagatcatggtgaacagcaggtactcgccgatgagtgggatgaccagtgaggtggacgggatgatctcggtgatgagcagcagcaggaagacggtgagcgacagcagcacggagatgcacagcgtgatcttctcgccacactcggagggcaggtagaagaccagcacggtgaggcaggaga

SEQ ID NO: 10627 - DNA, 205 bp, Artificial Sequence
  Synthetic polynucleotide
tgacttttcccttgcttctctttttcaccttcccacagtgtccactcccctcggccagggccgcgtcaaccagctcggcggtgtttttatcaacggcaggcaggccgctgcccaaccacatccgccacaagatcgtggagatggcccaccacggcatccggccctgcgtcatctcgcgccagctgcgcgtgtcccacggctgcgt

SEQ ID NO: 10628 - DNA, 205 bp, Artificial Sequence
  Synthetic polynucleotide
cgaggcccaggaggtggggcagcttctgcagcagcacatggagtgcgccattgggcaggcgctgctggtgcatgcacggaatgcagccaccaagagccggccgggccaaggacagggatgacttcaaggtatgcactgacctctgtccctggggacaccgagggcaagaatgttcagggtagggtccatgcctgggtctgctcct

SEQ ID NO: 10629 - DNA, 205 bp, Artificial Sequence
  Synthetic polynucleotide
cccctcctccaccctcgccccctcctctctgttctcctcccctctctgaggcccattctctgtttcccacagacacggagcagccaggggaggtgtcggccggccttggggccgggccgggcgggggcagggccgagtagccggggccggccgggggggccgtggggggagagcccgtccagtggcccctccagccctgagagca

SEQ ID NO: 10630 - DNA, 204 bp, Artificial Sequence
  Synthetic polynucleotide
acccaaattcttggagttgatgttgactgtggaattctaatgtgcttggctcttagggtatgactggtttccctggtgctgctggacggactggtccccccccaggaccctctgtaagtaaatcactgtaaacgtgtcttcatttactctagccaaaaggcctggcttctgataggaaactggtaagaaactcttcatgaaaac

SEQ ID NO: 10631 - DNA, 207 bp, Artificial Sequence
  Synthetic polynucleotide
cagtgtcctcatgccaacccctttcccccagtgtgggtctcagaggtcatgctgcagcagacccaggttgccactgtgatcaactactataccggatggatatggatgcaggtgactccaggggaggaagggaagggtcatgggtcagaccccagatgagagcctctactttggggtgggtgtagagaaggcttcctctaccacctt

SEQ ID NO: 10632 - DNA, 213 bp, Artificial Sequence; identical to SEQ ID NO: 10165
  Synthetic polynucleotide

SEQ ID NO: 10633 - DNA, 209 bp, Artificial Sequence
  Synthetic polynucleotide
cggccccgggacagcgggcggctggacaaagcgtcgcccgactcacgccatagccccgccaccatctcgtccagcactcgcggcctgggcgcggaggagcggaggagcgcaggagcccggttcgcgagggcacagcgccggccaaggtggaagaggcgcgcgcgctcccgggcaaggaggccttcgcgccgctcacggtgcagacggac

SEQ ID NO: 10634 - DNA, 211 bp, Artificial Sequence; identical to SEQ ID NO: 10368
  Synthetic polynucleotide

SEQ ID NO: 10635 - DNA, 204 bp, Artificial Sequence
  Synthetic polynucleotide
gcacgggccgcgcacgcagcgccgcgctgccgcgcagatcgcgcaggcactgctgggcgccgaggagcgcaaagtggaaatcgccttctaccggaaagatgatggtaggagcgggccggggcggggccacgaccaggggcggggtcaagaggggcgggaccacggcgaggggcagggtgcgtgggggtgtgggggtgtgggggc

SEQ ID NO: 10636 - DNA, 205 bp, Artificial Sequence
  Synthetic polynucleotide
gagccgcgtttctttcctcactggcaggagacctgacaccacccgcctgtacgacttcaactcctactggagggtgcacgctggaaacttctccaccatccatcccccagtacttcaaggagaatggctatgtgaccatgtcggtgggaaaagtctttcaccctggtactgctccatgtccagagtctgggttctcttggtttgt

SEQ ID NO: 10637 - DNA, 205 bp, Artificial Sequence
  Synthetic polynucleotide
atactgtctgtccccacaggtggtctccgtgggcatcaaagacgtgtttgacttcatcccaggctcagaccagctcaatgtcatttcttgccaaggcctgcctggcaccatcccagggccggcccggcctctcgctggtcaaggagaactatgcagagctgctggaggatgccttcctgaagaatgtcaccgcccagatctgcat

SEQ ID NO: 10638 - DNA, 207 bp, Artificial Sequence
  Synthetic polynucleotide
gctcctagagaccacagccccccctcacagggcagccccggcaacagtgcggccagggactcaggcggccagacgtccgccgggtgtccctctggctggctggctgggcacgagacggcggggcctggtgatggaggccccccagggcagcgaggccacactgcctggccctgcccctggcgagccctgggaagcaggcggccccca

SEQ ID NO: 10639 - DNA, 215 bp, Artificial Sequence
  Synthetic polynucleotide
ctggtggtcttccgcatcgtgctgacggctgtgggcggcgaggccatctactcggacgagcaggccaagttcacttgcaacacgcggcagccaggctgcggcagccaggctgcgacaacgtctgctatgacgccttcgcgcccctgtcgcacgtgcgcttctgggtcttccagattgtggtcatctccacgccctcggtcatgtacctgggctac

SEQ ID NO: 10640 - DNA, 204 bp, Artificial Sequence
  Synthetic polynucleotide
ctgtctcacacagattccacccccgttttccgttgctccaggatctgcggcggaaagcggcccggctggtggccgccaagtgcacactggcagcccgtgttgtggacagtttccacgagagcacagaagggaaggtgaggagggaaaggtgaggggcggccgggcgtcttttcctctgggcctggggtgtctctgcagggagac

SEQ ID NO: 10641 - DNA, 205 bp, Artificial Sequence
  Synthetic polynucleotide
ggggtcgttctgggagctgtgatcgggggtgtcctcggggtggtgctgttgctgctgctgcttttctacgtggttcggtactgctggctacgcaggcaggcaggcggccctgcagaggaggctcaggtaaggggcggagcctagctcccctccccctctccccactatcccccatctgggcggagactactccagtgggtgggag

SEQ ID NO: 10642 - DNA, 208 bp, Artificial Sequence
  Synthetic polynucleotide
ggacgcacgggcatggggaccccggggagccagatggcccccgtgagcctgaatgtgccccgacccaaccaggtgagcgggcccgtcatgcccagcatgccgcatgcctcccgggcagtggcagcaggcgccccttccccagcagcagcccatgccaggcttgcccaggcctgtgatatccatgcaggcccaggcggccgtggctggg

SEQ ID NO: 10643 - DNA, 205 bp, Artificial Sequence
  Synthetic polynucleotide
ggagaggtggtgcccttgggaggtcttgggcaggggtgggatataactggggggcccagctgattccctccccttccactccaggcctggcctccacgcacgcaggcacagagtgtgccggtcatcaacagcatgggcagcagcctgaccaccctgcagcccgtccagttctcccagccgctgcacccctcctaccagcagccgc

SEQ ID NO: 10644 - DNA, 204 bp, Artificial Sequence
  Synthetic polynucleotide
agcaattatagatcagtttggtcagagaataatctctgagcatttcctcgtggaggacagttactttcctgagaacatgtgctcacgtgtgcaatacaggtggtaaggccccctccacccattagcaagcgaaggtaattttattgacattcctgtgtaattctgttcttcaagtaacatgcaaataaatgccaaaccaaagat

SEQ ID NO: 10645 - DNA, 205 bp, Artificial Sequence
  Synthetic polynucleotide
tgtgccaccagacagcatacctggttccgcaggtcctggcttaggccctggcactggtccagggggacccctccagccagctccatgcccagcacccgtgtcgtcgtgcacagctccttaaccacggctgggacccggaagaaggggtcatttgccagcagctgcctggggcagaaggaaagggaggaaggggacttcgtgcttc

SEQ ID NO: 10646 - DNA, 207 bp, Artificial Sequence
  Synthetic polynucleotide
ccttgcccgctccggggctgctcgcgatccccacgaccacgtgcctctcctctcccgcaggccgcgccaagaccttccgcctgaagctgcccgcgctgctgctgctggcgctgacggcccgggagtcgtcggtgcggtcgggcggcgcgggcggcgcgggcgccccgggggccgtggtggtggacgtggacctgacgcccgcggcac

SEQ ID NO: 10647 - DNA, 206 bp, Artificial Sequence
  Synthetic polynucleotide
gggccctaggggattttaagcaggttccaggaaccccccgttcagttcctggtcccccactttctcaaccccacagatgctccgggcccctgcccctgccctgccccagctatggctcctggggctccctcatccagccccagccctatcctggctgtgctgctcttctcttctttgggtaagtggagccactctactctgggagt

SEQ ID NO: 10648 - DNA, 206 bp, Artificial Sequence
  Synthetic polynucleotide
gacatcgagcggctgggccgcttcctctggtcgctgcccgtggcccccggggcgtgcgaggccatcaacaaacacgagtcgatcctgcgcgcgcgcgccgcgccgtggtcgccttccacacgggcaacttccgcgacctctaccacatccttgagaaccacaagttcaccaaggagtctcacggcaagctgcaggccatgtggctc

SEQ ID NO: 10649 - DNA, 205 bp, Artificial Sequence
  Synthetic polynucleotide
ggcaccgaaggcgcccgaggcgacgctgggtccgtgctggggctgttcgtgcggctctgatcccggggtgggcagagcggggcttccgggtgggcggcccgcccgtggcactcctgtaccgctgctgcttttgtggtgaagaccacccgcggcagggcagcatcctctacagcttgctcactagctcaaagcaaacgcacgtggc

SEQ ID NO: 10650 - DNA, 206 bp, Artificial Sequence
  Synthetic polynucleotide
cccctgaccagcgcgtcgaccgcggccgcgctcctgagacagcccacacccgccgtggagggcgcagtggcatcgggcgccctggccgacccggccacggcacggcggccgcagacagacgcgcctctagcatagccgcgctgaggctcaaggccaaggagcacgcggcgcagctcacgcagctcaacatcctgccgggcaccagc

SEQ ID NO: 10651 - DNA, 211 bp, Artificial Sequence
  Synthetic polynucleotide
ccagggctcccgcgggcccagccggcaggacgcggcctcccccgctcctccagcccgcggccgcggcggtactcacagacctgttctgcagccgccgccgccgctgccgctgccgccatcttcccgcgcccgccgccgccgagctccccgcccgactgtgcccgcccctccgcgaccgcaccctgcgcgcctgcgcttgcgccctggcggg

SEQ ID NO: 10652 - DNA, 220 bp, Artificial Sequence
  Synthetic polynucleotide
ctccccgcagcccgctagacgagccgatggcgcggccccggagagcccgggagccgctgctcgtggcgctgctgccgctggcgtggctggcgcaggcgggcgtggctggcgcaggcgggcctggcgcgcgcggcgggctctgtgcgcctggcgggcggcctgacgctgggcggcctgttcccggtgcacgcgcggggcgcggcgggccgggcgtgcgggc

SEQ ID NO: 10653 - DNA, 212 bp, Artificial Sequence; identical to SEQ ID NO: 10086
  Synthetic polynucleotide

SEQ ID NO: 10654 - DNA, 206 bp, Artificial Sequence
  Synthetic polynucleotide
cgctgctcatccttgcctctagctgcctattgctcgtggggctttgttgctggcccgccccgatcagaggtgcaatgctgggttttggcaggagctgctgggctggcactgctgaagtgtgtggaggctgagattgcaaactatgaggcgtgcctcaaggaggaggtagagaagaggaagaagttcaaggtgggtgatttctccag

SEQ ID NO: 10655 - DNA, 204 bp, Artificial Sequence
  Synthetic polynucleotide
ccgacccgtgcacgacgctgcccgggagggcttcctggacacgctggtggtgctgcaccgggccggggcgcggctggacgtgcgcgatgcctggggccgtcgtctgcccgtggacctggctgaggagctgggccatcgcgatgtcgcacggtacctgcgcgcggctgcggggggcaccagaggcagtaaccatgcccgcataga

SEQ ID NO: 10656 - DNA, 206 bp, Artificial Sequence
  Synthetic polynucleotide
ctgggcgctatgaggtccgggcagaggtgggcaatggcgtgtccaggcacaacctctcctgcagctttgacgtggtctccccagtggctgggctgcgggtcgggtcatctaccctgccccccgcgacggccgcctctacgtgcccaccaacggctcagccttggtgctccaggtggactctggtgccaacgccacggccacggctc

SEQ ID NO: 10657 - DNA, 205 bp, Artificial Sequence
  Synthetic polynucleotide
gggggctgaaggggagtaaaaaagagcccagggaggtggctggggcgggaggaatggatagaggggtgaggagagggagagaaactgacacagaaaagagaggagaggagagaggtttggggcaggggagagaagccagccagagtgggggcggcaggagatagtggagggggtgggggccaaggtggggccacaggaagagagg

SEQ ID NO: 10658 - DNA, 205 bp, Artificial Sequence
  Synthetic polynucleotide
caaggcccagttagacgcagctgtgaccttcggccccagccaggtggcccggggcgaggaccccgccctgcagatctgctgtcatcctggctgcaccccccccccgcccagcttgctgccattgcccagatccccatgcctgagggcccctcggctggcctgggcatgtgatggctcctcactgggagcctgtgggggaggctca

SEQ ID NO: 10659 - DNA, 205 bp, Artificial Sequence
  Synthetic polynucleotide
ccaagccccgagggtgacccgcgcttcagcttcctcctccacttctacacagtacccatacccaaaaccggcaccctcagctgcacggtagccctgcgtccgtcccaagaccgggtctcaagaccaggtgagtggggcctgggccggccccagcttcaagtgggagcttccaggtctgtggtttgcaggaagggacatggcagcc

SEQ ID NO: 10660 - DNA, 205 bp, Artificial Sequence
  Synthetic polynucleotide
ccccctcctctctgttctcctcccctctctgaggcccattctctgtttcccacagacacggagcagccaggggaggtgtcggccttggggccgggccgggccggcgggggcagggccgagtagccggggccggccgggggggccgtggggggagagcccgtccagtggcccctccagccctgagagcagtgaggatgagggccca

SEQ ID NO: 10661 - DNA, 204 bp, Artificial Sequence
  Synthetic polynucleotide
tgatctgcttgaatatggtgaccatgatggtggagacagatgaccaaagtcctgagaaaatcaacatcttggccaagatcaacctgctctttgtggccatcatcttcacaggcgagtgtattgtcaagctggctgccctgcgccactactacttcaccaacagctggaatatcttcgacttcgtggttgtcatcctctccatcg

SEQ ID NO: 10662 - DNA, 212 bp, Artificial Sequence
  Synthetic polynucleotide
tgcccggggtgcccggcgcggtcctgaccctctgcctctggctggcggcctccagcggctgcctggcggccggccccggcgcggctgctgcgcggcggctgcgcggcggctggacgagtcgctgtctgccgggagcgtccagcgcgctcgctgcgcctccaggtgcctgagcctgcagatcactcgcatctccgccttcttccagcacttcc

SEQ ID NO: 10663 - DNA, 206 bp, Artificial Sequence
  Synthetic polynucleotide
tattttggacagatatcatcaacgaagccattttcagtgccaaccgcctcacaggttccgatgtcaacttgttggctgaaaacctactgtccccagaggagaggatatggttctcttccacaacctcacccagccaagaggtaagggtgggtcagccccacccccccaaccttgaaacctccttgtggaaactctggaatgttctg

SEQ ID NO: 10664 - DNA, 204 bp, Artificial Sequence
  Synthetic polynucleotide
tccccagatggtgctcctggccaggtgcgaggggcactgcagccaggcgtcacgctccgagcctttggtgtcgttcagcactgtcctcaagcaacccttcctccgttcctcctgtcactgctgccggccccagacttccaagctgaaggcactgcggctgcgatgctcagggggcatgcgactcactgccacctaccggtacat

SEQ ID NO: 10665 - DNA, 212 bp, Artificial Sequence
  Synthetic polynucleotide
gtgactggctgaggcggcgccagttggccgggcacggggctgctgtaaggccgaggttgcggcggaagcggagaccatgttccgagcggcggctccggggcggctccggggcagctccggcgggcggtgagtccggactgggaaggcgaacccagggacggccccccgtcaacccgccgtccctatggggtcttgcaaagatcactggcccc

SEQ ID NO: 10666 - DNA, 204 bp, Artificial Sequence
  Synthetic polynucleotide
caacgaggagaaggcgcagcgtgaggccaacaaaaagatcgagaagcagctgcagaaggacaagcaggtctaccgggccacgcaccgcctgctgctgctgctgggtaagggcgggcggggggcgccggccccggcccgggggccctcgaagggcgccccgcaggccgcgcgcgccgagcccgccccccgccccgggcgcgcgct

SEQ ID NO: 10667 - DNA, 205 bp, Artificial Sequence
  Synthetic polynucleotide
gtacctccggggtggcgctggggttggctccatgaccaagatctatgggggacgtcagagaaacggcgtcatgcccagccacttcagccgaggctccaaggcagagtgtggcccgccgggtcctccaagccctggaggggctgaaaatggtggaaaaggaccaagatgggtaagcagggtagggggggctgcattgatggagtag

SEQ ID NO: 10668 - DNA, 206 bp, Artificial Sequence
  Synthetic polynucleotide
tgttcctgaggctcttgccccagctgctgaggatgcacgttcgcccgctggccccggcagctgtgcaggacacccagtcccggctacagaatggctcctctcctcgggatggtcgatcacaactggggaggaggtggccctctgcctgcctcgcagtgaactcctcttccagcagtggcagcggcaagggctggtggcggcagcgc

SEQ ID NO: 10669 - DNA, 204 bp, Artificial Sequence
  Synthetic polynucleotide
gagtgccaggcccccaagggtcatctccacaaaagaatgcagggggcacagccctcatggtcccattgttccccggccaggtgaactgtgtggtgatgcgacgaggccttaacgaggatgaactcctggactttgcggccttgactgagggcctccccctggatgtgcgcttcatagagtatatgccctttgatggtcagtgac

SEQ ID NO: 10670 - DNA, 206 bp, Artificial Sequence
  Synthetic polynucleotide
acaatggcggctgctcccacctgtgcctgctgtccccaagcgagcctttctacacatgcgcctgccccacgggtgtgcagctgcaggacaacggcaggacaggacgtgtaaggcaggtgaggcggtgggacgggacggggcgggcgggcggggcggggcctggcgggaatgggttgcggccgccgggggtgccccagaaggaacct

SEQ ID NO: 10671 - DNA, 205 bp, Artificial Sequence
  Synthetic polynucleotide
cagtcggggccgccagtaccaggagctccctcgatgccccgcccccacccccagcctcctcaacatccccctctccagcccgggtcggcggccccggggcgggcgacgtggagagcaggctggatgccctccagcgccagctcaacaggtgagggagtgcaggtggggtgggggggcacgccctggagtctggtccaggtcctgg

SEQ ID NO: 10672 - DNA, 205 bp, Artificial Sequence
  Synthetic polynucleotide
gtccccccagcgaacccacccacctggcagtagaggacgtctctgacaccacggtctccctcaagtggcggcccccagagcgcgtgggagcaggaggcctgcctggatggctacagcgtggagtactgcccagagggctgtgagtgtccccgcccccaacccccctccccaaaggaagaacatgctcaccttgccattgagcaga

SEQ ID NO: 10673 - DNA, 205 bp, Artificial Sequence
  Synthetic polynucleotide
tgtctgagaacatgctgtgtgcgggcatcctcggggaccggcaggatgcctgcgagggcgacagtggggggcccatggtcgcctccttccacggcacctgcctggttcctggtgggcctggtgagctggggtgagggctgtgggctccttcacaactacggcgtttacaccaaagtcagccgctacctcgactggatccatgggc

SEQ ID NO: 10674 - DNA, 204 bp, Artificial Sequence
  Synthetic polynucleotide
ccccgcgttccggacgcgggggaacgcgaacaccgtgtgggtggactaccccaatattgtccgggtcgtgccggtggggggccgcatctacattgacgacgacgggctcatctccctagtggtccagaaaatcggtgcggacgcgcctcccgccctgaccacatccgtgcgctgggcacattcccttctccttggctcccccat

SEQ ID NO: 10675 - DNA, 202 bp, Artificial Sequence
  Synthetic polynucleotide
ggctggcaggcacccacttgccgttggcccccactgtctcctttgcttgcagagctgtccgaggttctgtgggccatggtgatgcgcataggcctgggccctgggccgggaggtgggcgtggcggctgtggtgctggtccccatctttgccgcctttgccgtgatgaccgtggctatcctgctggtgatggagggactctca

SEQ ID NO: 10676 - DNA, 204 bp, Artificial Sequence
  Synthetic polynucleotide
ttgacgagcagagtggaaaggagaagtacaagcttctggtggaaggtgataacctgcgggcagtcatggccacacacggtgtgaagggcacccgaaccaccacctccaataacacctatgaggtaccactcagcccacggggtcgccttagggttaggctgtcttccttgtgccatctgcaggccttccactgattcccagtat

SEQ ID NO: 10677 - DNA, 210 bp, Artificial Sequence; identical to SEQ ID NO: 10266
  Synthetic polynucleotide

SEQ ID NO: 10678 - DNA, 205 bp, Artificial Sequence
  Synthetic polynucleotide
tcaggtaagtggtggtcaccagtcctctgccctcttcttcagggggccatggtcttcgagttggcgccctggacgtgccggcctcccagttcctgggcaggcagtgccacttctccaggaccacggactgcaccagccgcgaaacctgagaaggcctcagctggcacccgggttcctgtgcaggagaagacgaacctggcggcct

SEQ ID NO: 10679 - DNA, 205 bp, Artificial Sequence
  Synthetic polynucleotide
ctctgtggtatctgaactatcttctctaactgcaggttgggctcagatctgtgatagaacagtttcctgggaagcttgactttgtccttgtggatgggggggggctgtgtcctaagccatggccacaagcagttgatgtgcttggctagatctgttctcagtaaggcgaagatcttgctgcttgatgaacccagtgctcatttgg

SEQ ID NO: 10680 - DNA, 207 bp, Artificial Sequence
  Synthetic polynucleotide
cagggggatgaggattggtgtccagattcacaacacctggctgaatcctgatgtggtcaccacttacctacgggagaagcaccagatccgagtccgagcccgagcccagaggcttccagaagtacaggtctgtgtctctttccagtcccatggagctgaactctggaaggaataaagtcccatgtagcaggagcactgactgggagt

SEQ ID NO: 10681 - DNA, 219 bp, Artificial Sequence
  Synthetic polynucleotide
aacgacatccgcccgtggtgcttcgtgctgaaccgcgaccggctgagctgggagtactgcgacctggcacagtgccagaccccaacccaggcggcgcctccaacccaggcggcgcctccgaccccggtgtcccctaggcttcatgtcccactcatgcccgcgcagccggcaccgccgaagcctcagcccacgacccggaccccgcctcagtcccagacc

SEQ ID NO: 10682 - DNA, 202 bp, Artificial Sequence
  Synthetic polynucleotide
gaactgctccaagggagaaacttctgggagcctccaaactcctagctgtctcatcccttgccctggagagacggcagaaccatggcattttatagctgcttgctgggtcctcttggcactcacctggcacacctctgcctacgggccagaccagcgagcccaaaagaagggggacattatccttggggggctctttcctatt

SEQ ID NO: 10683 - DNA, 211 bp, Artificial Sequence
  Synthetic polynucleotide
cggctcctgggacactggatggggcaggcacagcccctcccatcgctgccgtccgtccccccagggcgccgagaccaggaagcgctcgcccacacttagcagccacagccagttcaagcggtcactggagctgctgatgcgcacgctgggtgcctgccagcccttctttgtgcgatgcatcaagcccaatgagttcaagaagcccatggtg

SEQ ID NO: 10684 - DNA, 206 bp, Artificial Sequence
  Synthetic polynucleotide
ggagggccacagggtcacgtggaccggccgcttcaagtacgtccgcgtgactgacatcgacaacagcgccgagtctgccatcaacatgctcccgttcttctcttcatcggcgactggatgcgctgcctctacggcgaggcctaccctgcctgcagccctggcaacacctccacggccgaggaggagctctgtcgccttaagctgct

SEQ ID NO: 10685 - DNA, 205 bp, Artificial Sequence
  Synthetic polynucleotide
catgcttgtggccatgaagtggctgtttgaagagtttgccatagatgggcgcttctgcatcagcatccatgacgaggttcgctacctggtgcgggaggagggaggaccgctaccgcgctgccctggccttgcagatcaccaacctcttgaccaggtatgcggggcccatggcctctagcctggccatgtgctcctatgtggggct

SEQ ID NO: 10686 - DNA, 207 bp, Artificial Sequence
  Synthetic polynucleotide
agggagctgtagctggatgctccctgctccccacaggcatcgtgaaggcctactacgtgcgtgcccgggctcacgcagaggtgtggaatgaggccgaggccgaggccaaggcggacctccagaaagtgctggagctggagccgtccatgcagaaggcggtgcgcagggagctgaggctgctggagaaccgcatggcggagaagcagg

SEQ ID NO: 10687 - DNA, 217 bp, Artificial Sequence; identical to SEQ ID NO: 9988
  Synthetic polynucleotide

SEQ ID NO: 10688 - DNA, 215 bp, Artificial Sequence
  Synthetic polynucleotide
gccctgatgggcagctgggtcgccagattagccacttcttctcggagaatgaggatttccgctgcattgctggcatgtgtgtggatgctcgtggtgatctgctcgtggtgctctcatcgtggctgacagtagtcgcaaggaaattctccattttcctaagggtgggggctatagtgtccttattcgagagggacttacctgtccggtgggcatag

SEQ ID NO: 10689 - DNA, 205 bp, Artificial Sequence
  Synthetic polynucleotide
tgttgtgatgcgtattcccgtagatccgagcaccagccggcgcttcagccccccctccagcagcctgcagcccggcaaaatgagcgacgtgagcccggtgtccggtggctgcgcaacagcagcagcaacagcagcagcagcaacagcagcagcagcagcagcaacagcagcagcagcagcaggaggcggcggcggcggctgcggc

SEQ ID NO: 10690 - DNA, 205 bp, Artificial Sequence
  Synthetic polynucleotide
ggcccttctcagctggttccagccagctggcctctgcctaactcactcccctctctcctgacccacagcccagcacggccccacccaagcccaagccgcccgcctccgctgaccaaggagacagtggtgttctgggacatgcgcctgtggcacgtggtgggcatcttttcgctcttcgtgttgtccatcagtgagtagctgttcc

SEQ ID NO: 10691 - DNA, 206 bp, Artificial Sequence
  Synthetic polynucleotide
tttccctcagcctggacccccgcagccccatctcttcagcacacccaccctgggctcctcggcctggcctgatcttctcatcccctaacaggccgcgccgagccgacttcctggagcagccggtgctgggcttcgtgaggctgcaggaggcagcggagctggaggcggtggagctgccggtgcctatacgcttcctctttgtgttg

SEQ ID NO: 10692 - DNA, 208 bp, Artificial Sequence; identical to SEQ ID NO: 10348
  Synthetic polynucleotide

SEQ ID NO: 10693 - DNA, 208 bp, Artificial Sequence
  Synthetic polynucleotide
gttaggtgaagtgattatccaggtgtttgatcacgttaattccctatcttgctgcagaaactcagaggatttcctcatcacaacagcacccacatttacgatttacgtaaagtttcagtgtctgaatcaaatgttctcttggatgaagaagtacttactgatccgaagatccaggcgctgcttcttactgttctagtaaggatttccc

SEQ ID NO: 10694 - DNA, 205 bp, Artificial Sequence
  Synthetic polynucleotide
caggaccgcttgcagttcgagactgtggaagtctcggagcccagcatgctgcagaagatcctcaccaccaggcggcgggagaccgggggcaacgagccactcactgcccgtgcccacgctgcagcaccatttggcaccgccggcggaggccaggaaggtgccctccgcctcccaggtccaagccatcaagtgctttctttccaaa

SEQ ID NO: 10695 - DNA, 206 bp, Artificial Sequence
  Synthetic polynucleotide
tcacgctgcgcctcgagttcccggcggccggccgcgccctggccgccctcagcgtccgcccctttgcgctgcgccgcctcagcgcgggcctctcgctgccttgcctctgctcacctcggtacgcccgtccccggccagaccccgcgcctcccaccggcagcgtcccgccccctcgcggggccccgccccggcagcgtctcacccct

SEQ ID NO: 10696 - DNA, 210 bp, Artificial Sequence
  Synthetic polynucleotide
gcgctgcgcggcctggccaacctgacgcacgcgcacctggagcgcggccgcatcgaggcggtggcctccagctcgctgcagggcctgcgccgcctgcgctgcctgcgctcgctcagcctgcaggccaaccgcgtccgtgccgtgcacgctggcgccttcggggactgtggcgtcctggagcatctgctgctcaacgacaacctgctggcc

SEQ ID NO: 10697 - DNA, 202 bp, Artificial Sequence
  Synthetic polynucleotide
ccggcccgacccgaccgcacccggcgcctgccctcgctcggcgtccccggccagccatgggcccttggagccgcagcctctcggcgctgctgctgctgcttgcaggtaccccggatcccctgacttgcgagggacgcattcgggccgcaagctccgcgccccagccctgcgccccttcctctcccgtcgtcaccgcttccct

SEQ ID NO: 10698 - DNA, 205 bp, Artificial Sequence
  Synthetic polynucleotide
caggcagaccatgtggaccctggtgagctgggtggccttaacagcagggctggtggctggaacgcggtgcccagatggtcagttctgccctgtggcctgcctgctgcctggaccccggaggagccagctacagctgctgccgtccccttctggtgagtgcccctcagcctaggcaagagctggcagcctgggttttcccaaaggg

SEQ ID NO: 10699 - DNA, 205 bp, Artificial Sequence
  Synthetic polynucleotide
tacgtggttgccctgggagcccacaccggggaggagagcgtggctgaccatcacgaggctgaatattatgtggctgccgtgtatgagcatccatccatccatcctgagtctgaaccctctggctctcatcagccgccaagaggccttggagctcatgaaccagaaccttgacatctatgaacagcaagtgatgactgcagcccaa

SEQ ID NO: 10700 - DNA, 205 bp, Artificial Sequence
  Synthetic polynucleotide
cccaagcagccacagtccccccgccgcgatggcgctgcaaagccaggcgagcgaggaagcaaaggggccctggcaggaggcagaccaggaacagcaggagggagccggtgggtagcccagagccggagtctgagccggagcctgagcccgagcccgagcccgtgccagtgcccccgcccgagccccagccggagccccagcccct

SEQ ID NO: 10701 - DNA, 204 bp, Artificial Sequence
  Synthetic polynucleotide
gttctgtgaccccttttcctcatctctgcctgcttcctcacagcttgaggcagccctaggtgaggccaagaagcaacttcaggatgagatgctgcggcggcgggtggatgctgagaacaggctgcagaccatgaaggaggaactggacttccagaagaacatctacagtgaggtggggactgtgctttgcaagccagagggctg

SEQ ID NO: 10702 - DNA, 205 bp, Artificial Sequence
  Synthetic polynucleotide
gagcctgccgggaggaagctccctggaaaccagcccccgcctcttccaggggtggttggggggaccctccaggcggccaccatctgtgcctccagccacccaccagtttctctccacacactacaacctgcacaacctctacggcctgaccgaagccatcgcctcccacaggtgagggccacgtcccgccccactgggctctgcc

SEQ ID NO: 10703 - DNA, 205 bp, Artificial Sequence
  Synthetic polynucleotide
tctggggggacagtcggggccgccagtaccaggagctccctcgatgccccgcccccacccccagcctcctcaacatccccctctccagcccgggtcggcgggcggccccggggcgacgtggagagcaggctggatgccctccagcgccagctcaacaggtgagggagtgcaggtggggtgggggggcacgccctggagtctggtc

SEQ ID NO: 10704 - DNA, 206 bp, Artificial Sequence
  Synthetic polynucleotide
ggccaggccccgcggccgacttctccgtgtcggtggagcgcgctctggctgccaagccgggcttggacacctacagcctgggcggcggcggcgcggcgcggcgcgcgtgcgggtgcgcggctccacgggcgtggcggccgccgcggggctgcaccgctacctgcgcgacttctgtggctgccacgtggcctggtccggctctcagc

SEQ ID NO: 10705 - DNA, 205 bp, Artificial Sequence
  Synthetic polynucleotide
atggtgattctaggtttgtcagctcctgtgccaaggggaaggaagggaaagaaggtgaaagcccagagcacacagccggtggtgcaggatgccgactggccagctggccagctgcaacccagatgccctgttccaggaggacagctacaagaaacacctgaagcatcactgtaacaagtatgttattagagggtggacctggaga

SEQ ID NO: 10706 - DNA, 206 bp, Artificial Sequence
  Synthetic polynucleotide
ggcatttctgccaccctccctctgctttacaatcaggctctcctccttcagatgagatccgcaccctccgagaccagttgcttttactgcacaaccagttagtttactctatgagcgttttaagaggcagcagcatgccctccggaacaggcggctcctccgcaaggtgatcaaagcagcagctctggaggaacataatgctgcca

SEQ ID NO: 10707 - DNA, 206 bp, Artificial Sequence
  Synthetic polynucleotide
tgcagcccggggggtgtccgggctgagcgggctcacccggttgttgtggcgcgcctgctccagagtggcggtgaagaggaagcagcggcaggggacgcccggctcgcggctcgggcacactggacgtacctgtgggggaaggagctggatgtgcaggccccgcccaccccgccgcaggccacctacggccccgcggtcacgctacc

SEQ ID NO: 10708 - DNA, 206 bp, Artificial Sequence
  Synthetic polynucleotide
gtcgtgctcccggcaggcgtggagccgcgataaccccggcttcgaggccgaggaggaggaggaggaggtggaaggggaagaaggcggaatggtggtggagtggagatggacgtagagtggcgcccgggcagccggaggtcggccgcctcctcggccgtgagctccgtgggcgcgcggagccgggggcttgggggctaccacggcgc

SEQ ID NO: 10709 - DNA, 212 bp, Artificial Sequence
  Synthetic polynucleotide
ctaagtggcgagtgcatccactccagctggcgctgtgatggtggccccgactgcaaggacaaatctgacgaggaaaactgcggtatgggcggggccagggcggggccagggtgggggcggggcgtcctatcacctgtccctgggctcccccaggtgtgggacatgcagtgatttaggtgccgaagtggatttccaacaacatgccaagaaag

SEQ ID NO: 10710 - DNA, 213 bp, Artificial Sequence
  Synthetic polynucleotide
cctcctttcttccctctctccaccagagcgatcgcctcaccggcccatcctccaagccggactgccggcaaatgcctccacagtggtcggaggagacgtaggaggagacctagagtttgtctgcaaggtttacagtgatgcccagccccacatccagtggatcaagcacgtggaaaagaacggcagtaaatacgggcccgacgggctgcccta

SEQ ID NO: 10711 - DNA, 218 bp, Artificial Sequence
  Synthetic polynucleotide
cacacgcgtgcagagcatggcgctgccccccggcgtagtgaactcgtacaatggcctgggaggcccgccggccgcacccccgcctccgccgcacccccacctccgccgcacccccacccgcatccgcacgcacaccatctgcacgcggccgccgcaccgccgcctgccccaccgcaccacggggccgccgcgccgccgccgggccagctcagccctgc

SEQ ID NO: 10712 - DNA, 201 bp, Artificial Sequence
  Synthetic polynucleotide
ggagtggggaggggtatcttgggcctagctaagttgtgtttttctttttcatttcacagggtccttctggtcctgttggtcctgctggtgctgttggcccaagaggtcctagtgtatgtacatgctgaagatttctttgcaacactaacatttagagagaatcagtccaaaacatctgttaagaaaataaacaatatatca

SEQ ID NO: 10713 - DNA, 201 bp, Artificial Sequence
  Synthetic polynucleotide
gcctcgtacgggccgtacacacgcgtgcagagcatggcgctgccccccggcgtagtgaactcgtacaatggcctgggaggcccgccggccgcacccccgcctccgccgcacccccacccgcatccgcacgcacaccatctgcacgcggccgccgcaccgccgcctgccccaccgcaccacggggccgccgcgccgccgccg

SEQ ID NO: 10714 - DNA, 201 bp, Artificial Sequence
  Synthetic polynucleotide
ctcgtacgggccgtacacacgcgtgcagagcatggcgctgccccccggcgtagtgaactcgtacaatggcctgggaggcccgccggccgcacccccgcctccgccgcacccccacccgcatccgcacgcacaccatctgcacgcggccgccgcaccgccgcctgccccaccgcaccacggggccgccgcgccgccgccggg

SEQ ID NO: 10715 - DNA, 214 bp, Artificial Sequence
  Synthetic polynucleotide
cccctctgaagacaaggaggacattgaaagcaacctgctccggcccacaggcgtagccctgcgaggagcccacttctgcctgaaggtcttccgggccgaggacttgccgcagagtgcgtggggcgcgcccttgggtgggaggtctgcaggaggctggaggcgcagggctggtgggggtgggcgatggcgggcggggtcagctccctgggggaag

SEQ ID NO: 10716 - DNA, 201 bp, Artificial Sequence
  Synthetic polynucleotide
aaatctgactggactgtgtgtgtctctcctctgtgtcccccagggcccgtcacagctggagctgactctccaggcatccaagcaaaatggcacctggccccgagaggtgcttctggtcctcagtgtaaacagcagtgtcttcctgcatctccaggccctgggaatcccactgcacttggcctacgtgagtgtgttccctcc

SEQ ID NO: 10717 - DNA, 201 bp, Artificial Sequence
  Synthetic polynucleotide
gcagtgcctacgtctaagctgggccaggcagaggggcgagatgcaggctcagcaccctccggaggggacccggccttcctgggcatggccgtgagcaccctgtgtggcgaggtgccgctctactacatctaggacgcctccggtgagcaggtgtgatcccagggcccctgatcagcagcggaggagcgctcgggccacctg

SEQ ID NO: 10718 - DNA, 201 bp, Artificial Sequence
  Synthetic polynucleotide
gcgcgactgcgtcacctaccagactgagtaccgctgggaggtgtatcgcaccgccagctgccagcggccggggcgcccagcgcgtgtggccctgcccggcgtggacgtgagccggcctcggctggtgctgccgcggctggcgctgcctgtggggcactactgctttgtgtttgtcgtgtcatttggggacacgccactgac

SEQ ID NO: 10719 - DNA, 201 bp, Artificial Sequence
  Synthetic polynucleotide
cggggtggggcttcgtactaacctcgtcccctaagccccgcccctgccccaggttctcctggagctgctgccgcgcctcctgggctccccgccgccgcccgaggccccccgggccgcctcgcccccaaggcgggcgtcgtcggtgggcttattgctccgcgcggaggagctgatactgaaaaagccacggagcgagctcgt

SEQ ID NO: 10720 - DNA, 201 bp, Artificial Sequence
  Synthetic polynucleotide
ctcgactgtgcagggggtggaggtgggcccagcgccgcagggcgaggccttcagcctggagagctgccagaactggctgcccggggagccacacccagccacagccgagcactgcgtccggctcgggcccaccgggtggtgtaacaccgacctgtgctcagcgccgcacagctacgtctgcgagctgcagcccggaggtgt

SEQ ID NO: 10721 - DNA, 201 bp, Artificial Sequence
  Synthetic polynucleotide
agggggggccctggggcgccccctcccgggcactccctgagggctgcacggcaccgccacaggcactgcacccgttcgcggcggacgacacctgccggaccagccagggctccccggctttccagccgcccgagattgccaacggcctggacaccttctccggcttcaaggtggacatctggtcggctggggtcaccctgt

SEQ ID NO: 10722 - DNA, 201 bp, Artificial Sequence
  Synthetic polynucleotide
aggctggaggctgatgcaaatcaggtgctggagtgggtacgggcaccacctcacgtccgatttccagctcgccaggcctggtaccggccagccagccccgaaagcctgcattaccacttgtgcagtgccccccgggccctgctgcaggatgtgctgcctaagtatatcctggacttctccctctttgcctacccactgcct

SEQ ID NO: 10723 - DNA, 201 bp, Artificial Sequence
  Synthetic polynucleotide
cggctgcgggcctgggccctcggccccactgaccctcttctctgcacagctcctaagccactgcctgctggtgaccctggccgcccacctccccgccgagttcacccctgcggtgcacgcctccctggacaagttcctggcttctgtgagcaccgtgctgacctccaaataccgttaagctggagcctcggtggccatgct

SEQ ID NO: 10724 - DNA, 201 bp, Artificial Sequence
  Synthetic polynucleotide
ttaaacatggatttttgaaaagtggattgaagacaaatctggttctttcctattagaaaatcaaagaaattacttatatgcactctgaaggcatccttgctggtgaattgaaacatggccctctggctttggtggataaattgatgcctgtgatcatgatcatcatgagagatcacacttatgccaagtgtcagaatgctc

SEQ ID NO: 10725 - DNA, 201 bp, Artificial Sequence
  Synthetic polynucleotide
gtgaaatcacaaaggagcgagaagatgagtgttttagttgtggggatgctggccagctcgtctcctgcaagaaaccaggctgcccaaaagtttaccacgcagactgtctcaatctgaccaagcgaccagcaggttggtgccaaaatccatttgtaccgctactcgttctctccatcatactcagggtctcatgccatttgc

SEQ ID NO: 10726 - DNA, 201 bp, Artificial Sequence; identical to SEQ ID NO: 10721
  Synthetic polynucleotide

SEQ ID NO: 10727 - DNA, 201 bp, Artificial Sequence
  Synthetic polynucleotide
cagcagcagcagcagcaacagcagcagcagcagcaggaggcggcggcggcggctgcggcggcggcggcggctgcggcggcggcagctgcagtgccccggttgcggccgccccacgacaaccgcaccatggtggagatcatcgccgaccacccggccgaactcgtccgcaccgacagccccaacttcctgtgctcggtgctg

SEQ ID NO: 10728 - DNA, 201 bp, Artificial Sequence
  Synthetic polynucleotide
tgcacctgcagctgctggcccaagctgactacagactcagcgatgtgatgcgagaatcactgctggaagaccagctcagccctgtcctcactgaaccccacctccttgccctggatcgaaggctccaaaccatcctaaggacagtggaggggtgcatagtggcccatggacagcagagtgtcatagtcgacggcccagtgg

SEQ ID NO: 10729 - DNA, 201 bp, Artificial Sequence
  Synthetic polynucleotide
ccacagtgtatcggctagcctatctccggctaaatacactttgtgaacgccttctgtctgagcacccagaattagaacatatcatctggacccttttccagcacaccctgcagaatgagtatgaactcatgagagacaggcatttggaccaagtaagaaaatcaagcacttcaccttctctcctccctacttacttgttaa

SEQ ID NO: 10730 - DNA, 201 bp, Artificial Sequence
  Synthetic polynucleotide
gatgactttttcgtgttgaagttaactgaataacagctttctcagccaaggcaaagacacattgatttggttcttcctttgtagagagtgttcatctgggacttggatgagacaatcattgttttccactccttgcttactgggtcctacgccaacagatatgggagggtgagtaccaagaggcatcagtttttaatttct

SEQ ID NO: 10731 - DNA, 201 bp, Artificial Sequence
  Synthetic polynucleotide
ggtcgtgcagacccgggagaaagatgtcaaacgtgcgagtgtctaacgggagccctagcctggagcggatggacgccaggcaggcggagcaccccaagccctcggcctgcaggaacctcttcggcccggtggaccacgaagagttaacccgggacttggagaagcactgcagagacatggaagaggcgagccagcgcaagt

SEQ ID NO: 10732 - DNA, 201 bp, Artificial Sequence
  Synthetic polynucleotide
cagtgagagctgtgaatgaattctccgggtggacgagggaagaagaaaggctccggcggcgccagcaacccggtgcctcccaggcctccgcccccttgcctggcccccgcccctcccgccgccgggccggcccctccgcccgagtcgccgcataagcggaacctgtactatttctcctacccgctgtttgtaggcttcgcg

SEQ ID NO: 10733 - DNA, 214 bp, Artificial Sequence
  Synthetic polynucleotide
tcaagatgtaaatgaattatatgaagattttgttactttaaaattatttacatattctactcactagggatctccaggataccaaggaccccctggtgaacctgggcaagctggtccttcagtaagtaacaattaaatttatatttagtaagtcgataattccatatggaacctacctttgttttctaaaacaagtataggtctttacagaatg

SEQ ID NO: 10734 - DNA, 201 bp, Artificial Sequence
  Synthetic polynucleotide
cttgtcattgtttaatgcatacttaaacaattttatttttgtcttgaaattattaataatgtggttttctgtccacttcccctatgcaggtgtccaacggatgtgtgagtaaaattctgggcaggtattacgagactggctccatcagacccagggcaatcggtggtagtaaaccgagagtagcgactccagaagttgtaa

SEQ ID NO: 10735 - DNA, 201 bp, Artificial Sequence
  Synthetic polynucleotide
gtttcagcactctacccagaccctcccggccccagggtccacacgtgctcggccgcaggaggcttcagcaccagcgattacgacgttggctgggagagtcctcacaatggctcggggacgtgggcctattcagcgccggatctgctggggtgagcagagcgagggccccgggcgtctacgccaaggacaagggagtagttc

SEQ ID NO: 10736 - DNA, 201 bp, Artificial Sequence
  Synthetic polynucleotide
tcactacttccccatctcccacatccggctatgggccctgcagctgatcttcgtgtccacgccagcgctcctagtggccatgcacgtggcctaccggagacatgagaagaagaggaagttcatcaagggggagataaagagtgaatttaaggacatcgaggagatcaaaacccagaaggtccgcatcgaaggctccctgtg

SEQ ID NO: 10737 - DNA, 201 bp, Artificial Sequence
  Synthetic polynucleotide
agtaataatgatttgaacaccactgagaagcgtgcagctgagaggcatccagaaaagtatcagggtagttctgtttcaaacttgcatgtggagccatgtggcacaaatactcatgccagctcattacagcatgagaacagcagtttattactcactaaagacagaatgaatgtagaaaaggctgaattctgtaataaaagc

SEQ ID NO: 10738 - DNA, 201 bp, Artificial Sequence
  Synthetic polynucleotide
gctgatacagagggaggtcccctaactgttgaccttgtgaacagtaaggtcgttgtttcgttctgcagagagacggtgtccatcagcatccgggcctccctgcagcagacccaggctgtccctcttttgatggctcatcagtacctccgcggaagtgtagaaacccaggtgaccatcgcgacggccatcctcgcgggcgtc

SEQ ID NO: 10739 - DNA, 201 bp, Artificial Sequence
  Synthetic polynucleotide
tgcttgctgacgtggctctccatctcttcccagaaaaaattgcctgtgtcgtcccttcagaatgtgagaaatattgcggtaccaaggttggctgtaccaacatcgcctatccaaccttagtggtggagctcatgcccaatggtgagattctttcttgggaggttggtagagtctttcttgggaggctgattgggtttaggc

SEQ ID NO: 10740 - DNA, 201 bp, Artificial Sequence; identical to SEQ ID NO: 10723
  Synthetic polynucleotide

SEQ ID NO: 10741 - DNA, 201 bp, Artificial Sequence
  Synthetic polynucleotide
aaatagcccagtataagcgggagtgcccgtccatctttgcttgggaaatccgagacagattactgtccgagggggtctgtaccaacgataacataccaagcgtaagttcattgagaacatctgccctccctgccctaagcccaatgctctctcctctttacctcctcccaccctctctctccactgtctcttagtctgtgt

SEQ ID NO: 10742 - DNA, 201 bp, Artificial Sequence
  Synthetic polynucleotide
aaatgctacagctttgaggctaaatcatatgtcaaataaaactacttcatcaaaaaacatggaaatggtccaacagaaaaaagagggccccattccaccagatgcacaaaatccagatatgtcgttctttaagatgctattcttgccagaatcagcaaggtggatacaaaggactcatggaaagaactctctgaactctgg

SEQ ID NO: 10743 - DNA, 201 bp, Artificial Sequence
  Synthetic polynucleotide
atgagccctaccacctgcaccctgaggaaacacaagaccaatcggaagccgcgcacgccctttaccacatcccagctcctcgccctggagcgcaagttccgtcagaaacagtacctctccattgcagagcgtgcagagttctccagctctctgaacctcacagagacccaggtcaaaatctggttccagaaccgaagggcc

SEQ ID NO: 10744 - DNA, 201 bp, Artificial Sequence
  Synthetic polynucleotide
gtgcctcctttaaactgttttcatctcacaaggatgttagtagaaagtaaacagaagagtcatatctgttttcacagcccaattatacagaaatccgacagtactgcaatcactggcgaaattttgctgacattgatgattcctggaaaagtataaagagtatcttggactggacatcttttaaccaggagagaattgttg

SEQ ID NO: 10745 - DNA, 201 bp, Artificial Sequence
  Synthetic polynucleotide
cagcgctgtaggggtctttacgtgttccaaggggacagtagcccctgctcggccttcgagttccactgcctaagtggcgagtgcatccactccagctggcgctgtgatggtggccccgactgcaaggacaaatctgacgaggaaaactgcggtatgggcggggccagggtgggggcggggcgtcctatcacctgtccctgg

SEQ ID NO: 10746 - DNA, 201 bp, Artificial Sequence
  Synthetic polynucleotide
tcctttcttccctctctccaccagagcgatcgcctcaccggcccatcctccaagccggactgccggcaaatgcctccacagtggtcggaggagacgtagagtttgtctgcaaggtttacagtgatgcccagccccacatccagtggatcaagcacgtggaaaagaacggcagtaaatacgggcccgacgggctgccctacc

SEQ ID NO: 10747 - DNA, 201 bp, Artificial Sequence; identical to SEQ ID NO: 10729
  Synthetic polynucleotide

SEQ ID NO: 10748 - DNA, 201 bp, Artificial Sequence
  Synthetic polynucleotide
ggaagtgcgagccaaggaccaggacatcttggatctggtgggtgtgctgcacgatcccgagactctgcttcgctgcatcgctgaaagggccttcctgaggcacctggtagggcctgtgctccacctgtggagggctggggacttggagagctgggaaaggtggcagggaagatttcttacatgaatgctctgtatacagtg

SEQ ID NO: 10749 - DNA, 201 bp, Artificial Sequence
  Synthetic polynucleotide
taagcatgtaatagagtgtgctaaacagaaagccctggaacttgaggagtttcagtatattggagaatcgcaaggatatgatatcatggaaccagcagcaaagaagtgctatctggaaagagaggtttgtcagtttgttttcatagtttaacttagcttctctattattacataaacaggacactaagatgaaggtttttt

SEQ ID NO: 10750 - DNA, 201 bp, Artificial Sequence
  Synthetic polynucleotide
ggtgaggagcatgggggagatgaggagccacgggccttgtgttgttacagagtttgctgtcatcgtggaggtccacgcagccgcacgttccaccctccaccctgtggggtgtgaggatgaccagtctctcagcaagtacgagtttgtggtgaccagtgggagccctgtagctgcagaccgaggtgggtgcccccaggcaga

SEQ ID NO: 10751 - DNA, 201 bp, Artificial Sequence
  Synthetic polynucleotide
gtgcctgccaggggggaggctcctaaggcccaccccggtgttttccccgccagctgccttctgccagagcctgggcgccgccgcccccgaggtccgctgctgtgtggatgccgtgaacttcgtggccgagagcacgagagatcaggaggccaccggcgaggtgggacaggagccagaggcgggtggagcgaggcagaggcc

SEQ ID NO: 10752 - DNA, 201 bp, Artificial Sequence; identical to SEQ ID NO: 10716
  Synthetic polynucleotide

SEQ ID NO: 10753 - DNA, 201 bp, Artificial Sequence
  Synthetic polynucleotide
ccgaaagcccgctacctgctctgccagctgctgctgccaccttcctcatggagcaacatgagccccggaccccagctctggcacttgcttcaggcccttgtgtctatgtgtataagaatctcagaccctacttcaagttcagcctgccccaattgcctccaaatcctctggaacaagacctttggaaccaggccaaagagg

SEQ ID NO: 10754 - DNA, 201 bp, Artificial Sequence
  Synthetic polynucleotide
agattctgaagctgaagttcccaagaacagaagaagaaagacggatgcggacccaaagtaaaaggaggctagaagctaagaaagagcagcggcagaaaaactttgtggacctggcctgcgagtgcagcgcagtcatctgctgccgcgtcacccccaagcagaaggccatggtggtggacctggtgaagaggtacaagaaag

SEQ ID NO: 10755 - DNA, 212 bp, Artificial Sequence
  Synthetic polynucleotide
ctccacattctctgccttttcatctctctctgctcggcccagaacacgatcgtgaatgagctggtacgtgtgaccagtgagggagctggcctgcagctgcagaaggtgactgtcctgggcgtggccacggcgccccagcaggtcctctccaacggtgtccctgtctccaacttcacctacagccccgacaccaaggcaagagggcccagagt

SEQ ID NO: 10756 - DNA, 212 bp, Artificial Sequence
  Synthetic polynucleotide
ccctgtttctgtgtttttggcaggatgcaacctgaagatcttcaacaaccaggagttcgctgccctcctggcccagtcggtcaaccagggctttgaggctgtctaccagttgacccgaatgtgcaccatccgcatgagcttcgtcaaaggctggggagcggagtacaggtcagttatgggtgctgcctacatcaggggacccaactccaggt

SEQ ID NO: 10757 - DNA, 201 bp, Artificial Sequence
  Synthetic polynucleotide
tagcccctgctcggccttcgagttccactgcctaagtggcgagtgcatccactccagctggcgctgtgatggtggccccgactgcaaggacaaatctgacgaggaaaactgcggtatgggcggggccagggtgggggcggggcgtcctatcacctgtccctgggctcccccaggtgtgggacatgcagtgatttaggtgcc

SEQ ID NO: 10758 - DNA, 201 bp, Artificial Sequence
  Synthetic polynucleotide
tgtattataacaatttataatcttcacaggccaatcacacaagctggaagacccattacaggtttcctcaggcccagcacgcagagtggaaggccaggcactatggaacaggctatcagaacacccagaaccgcctacacagcccgccctatcaccagctcctccggaagatttgtcaggctgggaacggtaaattctatc

SEQ ID NO: 10759 - DNA, 201 bp, Artificial Sequence
  Synthetic polynucleotide
gtttggcatcttcctctacatgggggtcacgtcgctcagcggcatccagctctttgaccgcatcttgcttctgttcaagccacccaagtatcacccagatgtgccctacgtcaagcgggtacaggacccttttctggctgcccagcctggggtggtagagggtgctggggtgtgataggcactgaccccagcctccgcctg

SEQ ID NO: 10760 - DNA, 201 bp, Artificial Sequence; identical to SEQ ID NO: 10735
  Synthetic polynucleotide

SEQ ID NO: 10761 - DNA, 201 bp, Artificial Sequence
  Synthetic polynucleotide
cagggtgcgcgcagctccatctccatcctggagcaggagaaggtcgtcgcgcagcagatccggcagctcttccccaagttcgcggacacccccatttacaacgacgaggcggacccgctggtgggctggtccctgccacagccgtggagggcggacgtgacctacgcggccatggtggtgaaggtgggccggcccaacgcc

SEQ ID NO: 10762 - DNA, 201 bp, Artificial Sequence
  Synthetic polynucleotide
gtactatgaggaggcaagaagcgcctacctgagcaaggagctggcctccctgttgagggctggaggcgtcctggcctatgagctgctgccggcactggacgaggtgctggctagtgacagccgcttcttgctgggcagctggctagagcaggcccgagcagcggcagtcagtgaggccgaggccgatttctacgagcagaa

SEQ ID NO: 10763 - DNA, 212 bp, Artificial Sequence
  Synthetic polynucleotide
gattagagcccacctggaaacccttcatcctcacgcagttctctcgccacacagcaacactgctttccccactcaaccagagccggtgcctgacttacctcacggtgggcctcgctggagattttattggtatagcgcagaacctccagctccatatccgtcttaaacactcggcttcagagacagaagaacaaagcagcaaatcagtgact

SEQ ID NO: 10764 - DNA, 201 bp, Artificial Sequence
  Synthetic polynucleotide
gtgtgtcagctcatcttccagatcacaccgctgaacgtgacccagtggctgatggtgctgaaaatctccttgcccgtgattctcatggatgagacgctcaagtttgtggcccgcaactacctggaacctggtaaagagtgtgtgcagcctgccaccaaatcctgctcgttctcggcatgcaccgatgggatttcctggccg

SEQ ID NO: 10765 - DNA, 201 bp, Artificial Sequence; identical to SEQ ID NO: 10732
  Synthetic polynucleotide

SEQ ID NO: 10766 - DNA, 201 bp, Artificial Sequence
  Synthetic polynucleotide
aggggcatccccatcgagcgagtcgtctcctcggagggtggccggccctctgtggacctctccttccagccctcgcagcccctgagcaagtccagctcctctcccgagctgcagactctgcaggacatcctcggggaccctggggacaaggccgacgtgggccggctgagccctgaggttaaggcccggtcacagtcaggg

SEQ ID NO: 10767 - DNA, 201 bp, Artificial Sequence
  Synthetic polynucleotide
tcttttctattctttcgttttataggcgaatgtttcctccatttaaagtgagatgttctgggctggataaaaaagccaaatacattttattgatggacattatagctgctgatgactgtcgttataaatttcacaattctcggtggatggtggctggtaaggccgaccccgaaatgccaaagaggatgtacattcacccgg

SEQ ID NO: 10768 - DNA, 201 bp, Artificial Sequence
  Synthetic polynucleotide
ttcctggagactcacttcctagatgaggaagtgaagcttatcaagaagatgggtgaccacctgaccaacctccacaggctgggtggcccggaggctgggctgggcgagtatctcttcgaaaggctcactctcaagcacgactaagagccttctgagcccagcgacttctgaagggccccttgcaaagtaatagggcttctg

SEQ ID NO: 10769 - DNA, 207 bp, Artificial Sequence
  Synthetic polynucleotide
tgcccggtgctcacctgtggtcccgccagcttccagtgcaacagctccacctgcatcccccagctgtgggcctgcgacaacgaccccgactgcgaagatggctcggatgagtggccgcagcgctgtaggggtctttacgtgttccaaggggacagtagcccctgctcggccttcgagttccactgcctaagtggcgagtgcatccac

SEQ ID NO: 10770 - DNA, 201 bp, Artificial Sequence
  Synthetic polynucleotide
actaactacgtctgttgtctggtcagctctttgacaaaattgccatcctgagcttcggagagctgattttctgtggcacgccagcggaaatgcttgatttcttcaatgactgcggttacccttgtcctgaacattcaaacccttttgacttctatagtaagtttttctttcacattccccatcatgaatgttttttaaact

SEQ ID NO: 10771 - DNA, 201 bp, Artificial Sequence
  Synthetic polynucleotide
catggaagggtgaggccttgaggttgaggtgggggtgttggctgggggagctgccatgtatgcagttaccagaacgtggcgctggctttgcttccagggagtgtgtggggaagacggtgacattgcagggcaacctggacccctgtgccttgtatgcatctgaggtaacagccagggcccctctgtgtgtctgttactgtg

SEQ ID NO: 10772 - DNA, 201 bp, Artificial Sequence; identical to SEQ ID NO: 10714
  Synthetic polynucleotide

SEQ ID NO: 10773 - DNA, 201 bp, Artificial Sequence
  Synthetic polynucleotide
caggcggcacagggcgggcagctcttcgattacatccaggcagtctctagctacctggcaccgcccgtgtccgccgtcttcgtgctggcgctcttcgtgccgcgcgttaatgagcaggtgagcggcacgcgcgtggtgacggcagggctgggcttgcacatcctcagcaggctgacctgtttccttcgcagggcgccttct

SEQ ID NO: 10774 - DNA, 213 bp, Artificial Sequence
  Synthetic polynucleotide
gcacgcaccctcctcgtaaggcgtgtactccactttgtacatgccatcgccacggtcctgaacgtaggtctccgtcaggttgcctgaggggttggccacacgggccttgacgtgcggccctccggtctgtgtcagagcccgggcgtccacactgaactcagtggtggcctcacggaagacacctgcaaaggcacagagaggaggcttggggct

SEQ ID NO: 10775 - DNA, 201 bp, Artificial Sequence
  Synthetic polynucleotide
ggggcccgggggcccgggaggcgaacccggcaagggcggcgcagcagcagcggcggcggccgcggcagcggcggcggcggcagcggcagcggcggcagctggaggcctggctgcggctgggggccctggacaaggctgggctcccggccccggccccatcacctccatcccggattcgcttgggggtcccttcgccagcgt

SEQ ID NO: 10776 - DNA, 201 bp, Artificial Sequence
  Synthetic polynucleotide
cctggccccggcctggggctctgtgtgtttcagcactctacccagaccctcccggccccagggtccacacgtgctcggccgcaggaggcttcagcaccagcgattacgacgttggctgggagagtcctcacaatggctcggggacgtgggcctattcagcgccggatctgctggggtgagcagagcgagggccccgggcgt

SEQ ID NO: 10777 - DNA, 201 bp, Artificial Sequence; identical to SEQ ID NO: 10731
  Synthetic polynucleotide

SEQ ID NO: 10778 - DNA, 201 bp, Artificial Sequence; identical to SEQ ID NO: 10730
  Synthetic polynucleotide

SEQ ID NO: 10779 - DNA, 201 bp, Artificial Sequence; identical to SEQ ID NO: 10723
  Synthetic polynucleotide

SEQ ID NO: 10780 - DNA, 201 bp, Artificial Sequence
  Synthetic polynucleotide
ccaccttgcctgccccctggatcccaggtttgggagaggggcaggagtgacaggcctcacccccacaggcctggctgtgatgcactcacagggcagcgattacctggacatcggcaacaacccgagagtgggcaccaagcggtacatggcacccgaggtgctggacgagcagatccgcacggactgctttgagtcctacaa

SEQ ID NO: 10781 - DNA, 201 bp, Artificial Sequence
  Synthetic polynucleotide
cctggccaacctgctcctagccttcctgcggcgccagccacagccctggtgcctggtggcacacaatggtgaccgctacgacttccccctgctccaagcagagctggctatgctgggcctcaccagtgctctggatggtgccttctgtgtggatagcatcactgcgctgaaggccctggagcgagcaagcagcccctcaga

SEQ ID NO: 10782 - DNA, 201 bp, Artificial Sequence
  Synthetic polynucleotide
gtgcctgcttcgcttggcggccttcgcgcacgacgccagcccggccgcccgcgcccagctcttctccgcgctgcacggctatctgcgccccaaaccgccccggcccaagccggtagatccgaggcctccagcgccgcgcccatccctggaccccgccgcaccggcccttggccctgcgctgcaccagcgccccccagtgca

SEQ ID NO: 10783 - DNA, 201 bp, Artificial Sequence
  Synthetic polynucleotide
aatataactagtaaaagaagttttgtttatttttaaacagaattagttttaacaacattggacttccaaaaggctctccgcggatttcttcctgcgtctttgcgaagtgtcaacctgcataaacctagagacctgggttgggacaagattggtgggttacatgaagttaggcagatactcatggatactatccagttacct

SEQ ID NO: 10784 - DNA, 201 bp, Artificial Sequence
  Synthetic polynucleotide
taggttacctacatctcatacttgctttaatgtgcttttacttccggaatactcaagcaaagaaaaacttaaagagagattgttgaaggccatcacgtatgccaaaggatttggcatgctgtaaaacaaaacaaaacaaaataaaacaaaaaaaaggaaggaaaaaaaaagaaaaaatttaaaaaattttaaaaatataac

SEQ ID NO: 10785 - DNA, 201 bp, Artificial Sequence
  Synthetic polynucleotide
acagctccagacactcaggcattgggcacggacaagcttcatctgcagtcagagacagtggacaccgagggtacagtggtagtcaggccagtgacaatgagggacattcagaagactcagacacacagtcagtgtcagcccacggacaggctgggtcccatcagcagagccaccaagagtccgcacgtggccggtcagggg

SEQ ID NO: 10786 - DNA, 201 bp, Artificial Sequence
  Synthetic polynucleotide
gcctctaactccagcccccttcagcatctccggctacgacatccctgagggcacagtcatcattccgaacctccaaggcgcccacctggatgagacggtctgggagaggccacatgagttctggcctggtatgtggggggccgggggcctgccgtgaaaatgtggtggaggctggtccccgctgccgctgaacgcctcccc

SEQ ID NO: 10787 - DNA, 201 bp, Artificial Sequence
  Synthetic polynucleotide
gtgggaggggaggcgggaaacagcttagtgggtgtggggtcgcgcattttcttcaaccaggaggtgaggaggtttcgacatggcggtgcagccgaaggagacgctgcagttggagagcgcggccgaggtcggcttcgtgcgcttctttcagggcatgccggagaagccgaccaccacagtgcgccttttcgaccggggcga

SEQ ID NO: 10788 - DNA, 201 bp, Artificial Sequence
  Synthetic polynucleotide
gcaatgtcttcttttttgaaaggatataattgacactggcaaaacaatgcagactttgctttccttggtcaggcagtataatccaaagatggtcaaggtcgcaaggtatgtatgacattttgacacagaatattttcctcatttgaagggggattaagtgattgcttctttttaaggataaatgttttcaactgtcatttt

SEQ ID NO: 10789 - DNA, 201 bp, Artificial Sequence
  Synthetic polynucleotide
agctgaccaacctgaaggtgtgcattgaattaacagggctccatcctaaaaaacaacgccacttgctgcaccttagagaacgatgggagcagcaggtgtcggcagcagatggcaaacctggccggcaaagcaggaaggaagtgacccaggccactcagcctgaggccattcctcaggggactaacatcactgaagagaaac

SEQ ID NO: 10790 - DNA, 201 bp, Artificial Sequence
  Synthetic polynucleotide
gccttgtcagtgcttgattacatactctgtctccttccgttaattttagaatgagagcgctcgctgtgctgtctgtcacgctggttatggcctgcacagaagccttcttccccttcatctcgagagggaaagaactcctttggggtaagtagcaaacacattgcggtcttctggccttataaagttatttttcacacttac

SEQ ID NO: 10791 - DNA, 201 bp, Artificial Sequence
  Synthetic polynucleotide
accccacccccagctgcggggcgaatggaggcggcggcggcgggcccagcccggctggagctccgggggcggcggggcccgggggcccgggaggcgaacccggcaagggcggcgcagcagcagcggcggcggccgcggcagcggcggcggcggcagcggcagcggcggcagctggaggcctggctgcggctgggggccctg

SEQ ID NO: 10792 - DNA, 207 bp, Artificial Sequence
  Synthetic polynucleotide
agctattctctgtcctcccaccagcttcatgtactggactgactggggaactcccgccaagatcaagaaagggggcctgaatggtgtggacatctactcgctggtgactgaaaacattcagtggcccaatggcatcaccctaggtatgttcgcaggacagccgtcccagccagggccgggcacaggctggaggacagacgggggttg

SEQ ID NO: 10793 - DNA, 201 bp, Artificial Sequence
  Synthetic polynucleotide
tctcgtaccgcgcgcgctgcgagccgcctgccgtcgggaccgcgtgcacgcgcctctgccgtccgcgcagcgccccctcgcggtgcggtccgggactgcgcccctgcgcaccgctcgaggacgaatgtgaggcgccgcgtgagtcctgcgttcgaccccaccccgtcccagccggggaccccggcccctcctgagcgtcac

SEQ ID NO: 10794 - DNA, 201 bp, Artificial Sequence
  Synthetic polynucleotide
aggaggacattgaaagcaacctgctccggcccacaggcgtagccctgcgaggagcccacttctgcctgaaggtcttccgggccgaggacttgccgcagagtgcgtggggcgcgcccttgggtgggaggtctgcaggaggctggaggcgcagggctggtgggggtgggcgatggcgggcggggtcagctccctgggggaagg

SEQ ID NO: 10795 - DNA, 201 bp, Artificial Sequence
  Synthetic polynucleotide
aatgatgtttttcaggccttcaactcaaaccatatcataaacccttgcaacatgttcgtgactggccagaaatacttgctgaattgactaatctggatcctcaaagggaaacacctcagctttttctaagaagagatgtgagacttcccttggaagttgaaaaacaggtttgcttggaaatcttatttacagttatttaaa

SEQ ID NO: 10796 - DNA, 214 bp, Artificial Sequence; identical to SEQ ID NO: 10733
  Synthetic polynucleotide

SEQ ID NO: 10797 - DNA, 208 bp, Artificial Sequence
  Synthetic polynucleotide
gaggcagagcatacgcagcctgtacccagtggtgccgagcctctggcggtgccaagcctcacaccacccccacccacagatccactgtgcgacgagctgtgccgcacggtgatcgcagccgctgtcctcttctccttcatcgtctcggtgctgctgtctgccttctgcatccactgctaccacaagtttgcccacaagccacccatct

SEQ ID NO: 10798 - DNA, 201 bp, Artificial Sequence
  Synthetic polynucleotide
cttactacggagcacatttgcagtgaattgaggaatttgaatattttgaagaatgtttccgctgaatattcaatctacatcgcttgcgagccttccccttcagcgaacaatgaaatacatgtggccattgtaagtataagacccattcacacctcattattcgatggcaaggcagttcggttaaccagtgtctgaatggag

SEQ ID NO: 10799 - DNA, 201 bp, Artificial Sequence
  Synthetic polynucleotide
gggctcttctggccccagggtctctcaccctgtctctctcctgtccctcccctccagctggatgctgatgatgccaaggcaacctttgatgaggaggaaggtcgggatgaatacgacgaagtggccatgcctgtgtgaggggcgggcccaggccctagaccctcccccaccattccacatccccaccttccaaggaaaagc

SEQ ID NO: 10800 - DNA, 213 bp, Artificial Sequence
  Synthetic polynucleotide
gtaggtttctgctgtgcctgactggcatttggttgtacttttttttctttatctcttcactgctagaacaactatcaatttgcaattcagtacaattaggtgggcttagatttctactgactactagttcaagcgcatgaatatgcctggtagaagacttcctcctcagcctattctttttaggtgcttttgaattgtggatatttaattcga

SEQ ID NO: 10801 - DNA, 201 bp, Artificial Sequence; identical to SEQ ID NO: 10798
  Synthetic polynucleotide

SEQ ID NO: 10802 - DNA, 201 bp, Artificial Sequence
  Synthetic polynucleotide
ccgccgcgggaggagcccggactcgggccgaggctgcccaggcaatgcgttcactcggcgcaaacatggctgcggccctgcgcgccgcgggcgtcctgctccgcgatccgcgtaagtgggtctgtcgcggcggccgccagggccaggatccctgagaaggcgtgggcagagcgggcagctggcgcccgggccctcgcgccc

SEQ ID NO: 10803 - DNA, 201 bp, Artificial Sequence; identical to SEQ ID NO: 10761
  Synthetic polynucleotide

SEQ ID NO: 10804 - DNA, 207 bp, Artificial Sequence
  Synthetic polynucleotide
cgcggctcgggcacactggacgtacctgtgggggaaggagctggatgtgcaggccccgcccaccccgccgcaggccacctacggccccgcggtcacgctacctggcgcggctcgcggcgtctgggtttgtgttgtcgatggcgacccgtttcccttgcttcagggctgtctcacacgtggtcacacagcgctgccaggagcctagcg

SEQ ID NO: 10805 - DNA, 201 bp, Artificial Sequence; identical to SEQ ID NO: 10724
  Synthetic polynucleotide

SEQ ID NO: 10806 - DNA, 211 bp, Artificial Sequence
  Synthetic polynucleotide
ttgcgttctctccttgtgccctgccgtgagccaggcctttcttaattaccttgggggagtcactggtcactgttacccggaagaggtacatggacactgtcatgccagccatcatgaacagcaacaggccatggcgagggttcccgtagttggacagtcccgcctatggatacagtcccggcaatgtcacgtcctcagaacagggcagaga

SEQ ID NO: 10807 - DNA, 201 bp, Artificial Sequence
  Synthetic polynucleotide
gctacctggagatcagcctgcggctgcaccgcttgctgcgcgacagcgaggccttctgccaccgcaactgcagcgccgcgccgcagcccgagcccgccgccggcctcgccagctatcccgagctgcgcctcttcgggggcctgctgcgccgcgcgcactgcctcaagcgctgcaagcagggcctgccagccttccgccagt

SEQ ID NO: 10808 - DNA, 207 bp, Artificial Sequence
  Synthetic polynucleotide
tatagtctttctctcctctagcaaccttggaattcagagtcctactcacctgcgtagtgataaatattggttgtgaggccacaggggaactagtcacatgattggcattctgcatgacctgaacaggcctcaatactggttgagtaaccattgtgcccagacctggggctggattctgggtcaggatgagtggctgtccaccttgct

SEQ ID NO: 10809 - DNA, 201 bp, Artificial Sequence
  Synthetic polynucleotide
tggggctctaggcagtttgtctggggtgggacttggcatccctgcgccctgtgactctctgcccctgcgccccagggagcgcgggggcttctttagcccggaacccggtgagcccgacagcccctggacgggctcaggtggcaccacgccctccacccccacaacccccaccacggagggtgagggcgacggactctccta

SEQ ID NO: 10810 - DNA, 201 bp, Artificial Sequence; identical to SEQ ID NO: 10771
  Synthetic polynucleotide

SEQ ID NO: 10811 - DNA, 201 bp, Artificial Sequence
  Synthetic polynucleotide
gtggcctaccggagacatgagaagaagaggaagttcatcaagggggagataaagagtgaatttaaggacatcgaggagatcaaaacccagaaggtccgcatcgaaggctccctgtggtggacctacacaagcagcatcttcttccgggtcatcttcgaagccgccttcatgtacgtcttctatgtcatgtacgacggcttc

SEQ ID NO: 10812 - DNA, 201 bp, Artificial Sequence
  Synthetic polynucleotide
atggatgaaggctcagaagcatcctcctgctcatctgctttggcctcgaagcccagcccagagggagcctctgctgccagctttgagtacactatcctggaccccagctcccagctcttgcgtccatggacactgtgccctgagctgccccctaccccaccccacctaaagtacctgtaccttgtggtatctgactctggc

SEQ ID NO: 10813 - DNA, 201 bp, Artificial Sequence
  Synthetic polynucleotide
gaccactgccccctccaccccctggagctggtgggccacccatgccaccaccaccgccaccaccgccaccgccgcccagctccgggaatggaccagcccctcccccactccctcctgctctggtgcctgccgggggcctggcccctggtgggggtcggggagcgcttttggatcaaatccggcagggaattcagctgaaca

SEQ ID NO: 10814 - DNA, 201 bp, Artificial Sequence
  Synthetic polynucleotide
gtgtgagatggtgcagcccagtggtggcccggcagcagatcaggacgtactgggcgaagagtctcctctggggaagccagccatgctgcacctgccttcagaacagggcgctcctgagaccctccagcgctgcctggaggagaatcaagagctccgaggtgaggaaagagtcaggggatccagccctgctgaggggaaggc

SEQ ID NO: 10815 - DNA, 201 bp, Artificial Sequence
  Synthetic polynucleotide
tcagagcgtctggtgagatgctgttgccgctgctgctgctgctacccatgtgctgggccgtggaggtcaagaggccccggggcgtctccctcaccagtgagtcctcctgttcaccctcccgccaggctggaggtgggaggggccaacattgggccttagggataggcatttacagccttttgactcagtttcccggtagtg

SEQ ID NO: 10816 - DNA, 201 bp, Artificial Sequence
  Synthetic polynucleotide
ctgtgtgagatggtgcagcccagtggtggcccggcagcagatcaggacgtactgggcgaagagtctcctctggggaagccagccatgctgcacctgccttcagaacagggcgctcctgagaccctccagcgctgcctggaggagaatcaagagctccgaggtgaggaaagagtcaggggatccagccctgctgaggggaag

SEQ ID NO: 10817 - DNA, 201 bp, Artificial Sequence; identical to SEQ ID NO: 10750
  Synthetic polynucleotide

SEQ ID NO: 10818 - DNA, 201 bp, Artificial Sequence
  Synthetic polynucleotide
ttatacgtagtaggtgctcagtagatgttgcatgcatccatgattagtcccttggtcacaaactgttgtgctttttcctagtactccacccacctgcaccttgctgaggactgtatgaagcattaccaaggcaccgtagacaaactctgccgagtggagcaggtaggactctccttctgccacggcaagtttttgccaggc

SEQ ID NO: 10819 - DNA, 201 bp, Artificial Sequence
  Synthetic polynucleotide
ttctagtacctaaggaaattcagaaaagagcaatgcatcaaccaataaccattttttcttatttcattacagagaagaggtgaagagtccagtgaaatggagcaaatttcaatcattgaaaggttcccttatcccttccaggtgagttattttctctcaccaaatctcgaaaggcccctgtaacacaattagaaggggtgg

SEQ ID NO: 10820 - DNA, 201 bp, Artificial Sequence
  Synthetic polynucleotide
gcgtcatccctaccaacgttcccgagctcaccttccagcccagccccgcccccgacccgcctggcggcctcacctactttcccgtggccgacctgtctatcatcgccgccctctatgcccgcttcaccgcccagatccgaggcgccgtcgacctgtccctctatcctcgagaagggggtgtctccagccgtgagctggtga

SEQ ID NO: 10821 - DNA, 201 bp, Artificial Sequence
  Synthetic polynucleotide
ctgggaacataggttttgattgtcacctcaatgggactgcttcacagaagaaaagcctggttcataaaactttgcctgatgttctagcagaacctttatcaagtgaaagacatgagtttgtgatggcacaatatgtgaatgaatttcaggtaaattgttggtaacatttattgtgctttcctgattattaatgctatatga

SEQ ID NO: 10822 - DNA, 201 bp, Artificial Sequence
  Synthetic polynucleotide
aaaaagacctcatttataataaggtcactccaacatttcaccactggaagattgatgacaagaagtttggtcttacgtttcaaagtcctgctgatgctagggcttttgatagaggtatccgaagagctatagaggatatttctcaaggtaggtattcttgactattttcttaatttatttatcggttatatatagtagagg

SEQ ID NO: 10823 - DNA, 201 bp, Artificial Sequence
  Synthetic polynucleotide
gcctggtccaataccaggtggggctcttcctgtccactcccagcctcccactgtcccaccgcctcctgcctctctcctctctccccagaacatccagagtctgtcccctgtgaagaagaagaagatggtgcctggggctctgggggtccccgctgacctggcccctgttgacgtcgagttctcctttcccaagttctcccg

SEQ ID NO: 10824 - DNA, 201 bp, Artificial Sequence
  Synthetic polynucleotide
ctgaccatccagaagggcagtgggcggcaggaggatgagcgggaagtggcagagtttatggagcagcttggcacagccttgcgacctgacaaggtaccgcgagacatgcgtcgctgctgtttctgtcatgaggagggtgacggggccactgatgggcctgcccgtctgctgaacctggacctggacctgtgggtgcacctc

SEQ ID NO: 10825 - DNA, 201 bp, Artificial Sequence
  Synthetic polynucleotide
tacagttgatatagaagatcatgagtgtgctgtgtggctgctcctacggaagagcaagtcagatgacaaaaccacgcgactcgaggctgtgcgggaaatgtcggagacccatcactggcatggtaatgagactacctgaacaggtggcatgccttcagctggctcttgattgctgacataaaagacaagggagtggccagg

SEQ ID NO: 10826 - DNA, 201 bp, Artificial Sequence
  Synthetic polynucleotide
gagtttgctgaagaggaagatgttacccagggcagccttgctggtcaccacgcggcccagggcactgagggacctccagctcctggcgcagcagccgatctacgtaagggtggagggcttcctggaggaggacaggagggcctatttcctgagacactttggagacgaggaccaagccatgcgtgcctttgagctaatgag

SEQ ID NO: 10827 - DNA, 201 bp, Artificial Sequence
  Synthetic polynucleotide
ccgaccttggcccgcggccgccggtgagcctagacccgcgcgtctccatctacagcacgcgccgcccggtgttggcgcgcacccacgtccagggccgcgtctacaacttcctcgagcgtcccaccggctggaaatgcttcgtttaccacttcgccgtgtgagtatcgccaccggcgacggccggcacgaaggtgcttcctg

SEQ ID NO: 10828 - DNA, 201 bp, Artificial Sequence
  Synthetic polynucleotide
gctggccctggtggccctgggtgtcctgggcctgtggcatgtccgacggaggcaggagaagcagcgtggcctgcacagcgagctgggagagtccagtctcatcctgaaagcatctgagcagggcgacagcatgttgggggtatgggcctggggacctgggacacagggtgtaggaggggcagataggaactgcagaatcag

SEQ ID NO: 10829 - DNA, 201 bp, Artificial Sequence
  Synthetic polynucleotide
ccccccgcagaaacgtctacaaggacctgcggcagatcgagctggcctgtgactcccaggaagacgtggacagctggaaggcctcgttcctccgagctggcgtctaccccgagaaggaccaggtgaggagccgtcctgcgcagccaggcccagagcccccacctgggagaggaagcagggctggctttccccaggacaggt

SEQ ID NO: 10830 - DNA, 201 bp, Artificial Sequence
  Synthetic polynucleotide
acacacttctctctgtgcctttagaagtcggggacttcctctccctggacctgggtggcactaacttcagggtgatgctggtgaaggtgggagaaggtgaggaggggcagtggagcgtgaagaccaaacaccagatgtactccatccccgaggacgccatgaccggcactgctgagatggtgagcagcgcaggggccgggg

SEQ ID NO: 10831 - DNA, 201 bp, Artificial Sequence
  Synthetic polynucleotide
acggccgatcctgagccacctttggaagagctgggctaccacatctactccagcgacccaccttttgaagttcgtggtgccaatcagtggatcaagtttaagtcagtcagttaaggggaggagaaggagaggttataccttcagggggctaccagacagtgttctcaacttggttaaggaggaagaaaacccagtcaatga

SEQ ID NO: 10832 - DNA, 201 bp, Artificial Sequence
  Synthetic polynucleotide
cagtgccagtcctttccaaagaatgtgcatcaggggagagaggccgccgcatgagtcaaatgaagaccccgcacaatcccttggactccagcgccccactgatgaagaaagggaagcagagggagatccccaaggccaagaagccaacctcactgaagaaggtatgtggggtgtttcagccgaagtgaggcactagaaaac

SEQ ID NO: 10833 - DNA, 201 bp, Artificial Sequence
  Synthetic polynucleotide
atattaaagtcgtaattttgtttctaaactcatttggcccacaggtggaaatggtgtattcattgttgtcaatgcttggtactcatgataaggatgatatgtcgcgaactttgctagctatgtctagctcccaagacagctgtatatccatgcgacagtctggatgtcttcctctcctcatccagcttttacatggcaatg

SEQ ID NO: 10834 - DNA, 201 bp, Artificial Sequence
  Synthetic polynucleotide
gccctccagtgggtccgctctccctggggctggcgacagtggacatccagaaccctgacatcacgagttcacgataccgtgggctcccagcacctggacctagcccagctgataagaaacgctcagggaagaagaagatcagcaaagctgatattggtgcacccagtggattcaagtgagagccactccccagtggaccca

SEQ ID NO: 10835 - DNA, 201 bp, Artificial Sequence; identical to SEQ ID NO: 10731
  Synthetic polynucleotide

SEQ ID NO: 10836 - DNA, 201 bp, Artificial Sequence
  Synthetic polynucleotide
gctcacattccgtctctctggggaacacttttagagcctacatggaggacgcgcccctgctgagaggagccgtgttttttgtgggcatggctctctggggagcccaccggctctattctctcaggaactcgccgacatctgtgttgccatcattttaccaggtaaggcggtttctgtgtgcagtgagctggcaggaacggg

SEQ ID NO: 10837 - DNA, 201 bp, Artificial Sequence; identical to SEQ ID NO: 10751
  Synthetic polynucleotide

SEQ ID NO: 10838 - DNA, 201 bp, Artificial Sequence
  Synthetic polynucleotide
ggctggagcaacggcagctacagcatgatgcaggaccagctgggctacccgcagcacccgggcctcaatgcgcacggcgcagcgcagatgcagcccatgcaccgctacgacgtgagcgccctgcagtacaactccatgaccagctcgcagacctacatgaacggctcgcccacctacagcatgtcctactcgcagcagggc

SEQ ID NO: 10839 - DNA, 201 bp, Artificial Sequence
  Synthetic polynucleotide
cgtcactgtgaaggtcagcatgtgcccagatttttgctttgagaatataaaaaaaacttttattttctgttccagaactttccatgactggatcacagggaaaaaccgaccgagctcaggaagcctaatccaggtggtaaccacagaaggaaggacggaactcaccccagcatatttttaggcctcatctcagtgcctatg

SEQ ID NO: 10840 - DNA, 209 bp, Artificial Sequence
  Synthetic polynucleotide
cttttattacagaattcagccttttctacattcattctgtctttagtgagtaataaactgctgttctcatgctgtaatgagctggcatgagtatttgtgccacatggctccacatgcaagtttgaaacagaactaccctgatacttttctggatgcctctcagctgcacgcttctcagtggtgttcaaatcattattactgggttgatg

SEQ ID NO: 10841 - DNA, 201 bp, Artificial Sequence; identical to SEQ ID NO: 10818
  Synthetic polynucleotide

SEQ ID NO: 10842 - DNA, 201 bp, Artificial Sequence
  Synthetic polynucleotide
ttggctggtctcacaattgtactttactttgtattatgtaaaaggaatacacaacgctgaagaaccctgatactaagggatatttgttcttacaggcaacaatgcaggatttggaacagaggcgtccccagttggaagaactcattaccgctgcccaaaatttgaaaaacaagaccagcaatcaagaggctagaacaatca

SEQ ID NO: 10843 - DNA, 201 bp, Artificial Sequence
  Synthetic polynucleotide
gcagagcgggcttgccttctccctcaggtggccaaagtggagaagttcaaacacactcagagcaccaaggacagcctgcacgccaagtacaacaccgccacctgtggcacggtggtgggcgacgaccagtggggccacctccaggtggatgccacctctctcttcctcctgttcctggcccagatgaccgcctcaggtgag

SEQ ID NO: 10844 - DNA, 201 bp, Artificial Sequence
  Synthetic polynucleotide
tggggaactcccgccaagatcaagaaagggggcctgaatggtgtggacatctactcgctggtgactgaaaacattcagtggcccaatggcatcaccctaggtatgttcgcaggacagccgtcccagccagggccgggcacaggctggaggacagacgggggttgccaggtggctctgggacaagcccaagctgctccctga

SEQ ID NO: 10845 - DNA, 201 bp, Artificial Sequence
  Synthetic polynucleotide
cccgccctctctcccgcagttctcagggctgcgcagggacctgccgccctcggtgcacctgctcacgctggccagctggggccccgaaatggtgctgctgcgcttggagcaccagtttgccgtaggagaggattccggacgtaacctgagcgcccccgttaccttgaacttgagggtgagaagggcaaaattgagaaggag

SEQ ID NO: 10846 - DNA, 201 bp, Artificial Sequence
  Synthetic polynucleotide
caaaccctacaacagcagcggcctgggcggcccctccatcaaggacaagtatgtgacggcgctctacttcaccttcagcagcctcaccagtgtgggcttcggcaacgtctctcccaacaccaactcagagaagatcttctccatctgcgtcatgctcattggctgtgagtgtgcccaggggcgggcggcggggagagccca

SEQ ID NO: 10847 - DNA, 209 bp, Artificial Sequence
  Synthetic polynucleotide
gcactggggggcgctggtgcagcgcagggccaagggccggtgcggcggggtccagggatgggcgcggcgctggaggcctcggatctaccggcttgggccggggcggtttggggcgcagatagccgtgcagcgcggagaagagctgggcgcgggcggccgggctggcgtcgtgcgcgaaggccgccaagcgaagcaggcactcgcggaaa

SEQ ID NO: 10848 - DNA, 201 bp, Artificial Sequence
  Synthetic polynucleotide
agggggttgcctgtacctcggggagcccaagccccttttgagggcactgacgctcacgccccccgggtcttccaacacctgcagccaacatggcagcagccttcggaggcttcctctacttcttcacctacatcccctacttcttcgtggcccctcggtacaactggatgactctgagccagaagctctgctcctgcctcc

SEQ ID NO: 10849 - DNA, 200 bp, Artificial Sequence
  Synthetic polynucleotide
ccgcccctggccggcaccagcggtcagcccgcagcctcgaggcaagcagccctgcccctggcactatccgcccgcggggacggccactcaccgatgacggcattggcgatggtgatcttgagccacatgcggtcgcggatctccagtcccgagtctggcagctgcatgacccggacgacggcgctcatgtcactcttcac

SEQ ID NO: 10850 - DNA, 201 bp, Artificial Sequence
  Synthetic polynucleotide
gcgcaagggcaactactggacgctggacccggcctgcgaagacatgttcgagaagggcaactaccggcgccgccgccgcatgaagaggcccttccggccgccgcccgcgcacttccagcccggcaaggggctcttcggggccggaggcgccgcaggcgggtgcggcgtggcgggcgccggggccgacggctacggctacct

SEQ ID NO: 10851 - DNA, 212 bp, Artificial Sequence; identical to SEQ ID NO: 10763
  Synthetic polynucleotide

SEQ ID NO: 10852 - DNA, 201 bp, Artificial Sequence
  Synthetic polynucleotide
cagctgaccgttaaaagacaaggactctattatatctatgcccaagtcaccttctgttccaatcgggaagcttcgagtcaagctccatttatagccagcctctgcctaaagtcccccggtagattcgagagaatcttactcagagctgcaaatacccacagttccgccaaaccttgcgggcaacaatccattcacttggga

SEQ ID NO: 10853 - DNA, 208 bp, Artificial Sequence
  Synthetic polynucleotide
cagagcaaagtacagagtcaagagttccaaagccacagaccccagacccccccaggccaaagagaagctgcacttacggaggcaccagcaggcccaggggacccaggagtaccaggttcaccgcgaggaccttgagcaccttcaggaccacgggcaccagtggggccggcttcaccctgggaagagacagggaggatgaaatgaagaa

SEQ ID NO: 10854 - DNA, 201 bp, Artificial Sequence
  Synthetic polynucleotide
gcgatgcgaagaaccctgctgctgtgctgcccctgatgctgccaggaatggcgggcctgcccaacgtgtttggcttgggcgggctgttgaataaccctctgtcagctgctactggaaacaccactactgcttctagtcaaggagaaccggaagacagcacttcaaaaggagaggagaaaggaaatgagaatgaagacgaga

SEQ ID NO: 10855 - DNA, 210 bp, Artificial Sequence
  Synthetic polynucleotide
gaagaagagggctctgggcagcctgtggctggagaagttacctcggatcctttagccagagcaaatccgccccctagtagcagcacgatgccccagggcactttctcctgggttaccttccaatccagcaggggagggggataaaatggagttttcctttctgggaagaaaaagaaacacacacacacacacacacacacacacacacac

SEQ ID NO: 10856 - DNA, 201 bp, Artificial Sequence
  Synthetic polynucleotide
ggccagtctccggacctggcgcaccacgccgccagccccgcggcgctgcagggccaggtatccagcctgtcccacctgaactcctcgggctcggactacggcaccatgtcctgctccaccttgctatacggtcggacctggtgagaggacgccgggccggccctagcccagcgctctgcctcaccgcttccctcctgcccg

SEQ ID NO: 10857 - DNA, 201 bp, Artificial Sequence
  Synthetic polynucleotide
tgcctgccaggggggaggctcctaaggcccaccccggtgttttccccgccagctgccttctgccagagcctgggcgccgccgcccccgaggtccgctgctgtgtggatgccgtgaacttcgtggccgagagcacgagagatcaggaggccaccggcgaggtgggacaggagccagaggcgggtggagcgaggcagaggccc

SEQ ID NO: 10858 - DNA, 201 bp, Artificial Sequence
  Synthetic polynucleotide
ctcgtgctcaggctgctccaggcatgtgggaagctgaagcggcagctctgcgccatctaccggctgaactttctgaccacagcccccagcaggggaggcccacacctgccccagcacctgcaggaccaagtgcagaggctcatgcggtaagtgcagtgcggccccctgggtggccagggcagggtctggggcccgtacttc

SEQ ID NO: 10859 - DNA, 201 bp, Artificial Sequence
  Synthetic polynucleotide
ctggcaccggaggtggcggcggcggcggcggggcgagcggcgggactagcggcagctgcagccccgcgtcctcggagccgccggctgcgcccgccgaccgcctgcgcgccgagagcccgtcgccgccgcgcctgctggccgcgcactgcgcgctgctgcccaagccgggcttcctgggcgcgggcggcggcggcggcggca

SEQ ID NO: 10860 - DNA, 201 bp, Artificial Sequence
  Synthetic polynucleotide
ccatgcagcctggaatttgaggctacccagtgccccaacccattctcctacgtgcccaggcctctctcctctcattcagatcacatgaccttcctgcagcgggtgaagaacatgctcattgccttttcacagaactttctgtgcgacgtggtttattccccgtatgcaacccttgcctcagaattccttcagagagaggtg

SEQ ID NO: 10861 - DNA, 201 bp, Artificial Sequence
  Synthetic polynucleotide
ccagtggctattcatccctggcaaccctggagggcagcatggatggagaggagcaggccccccagctctacgtcctgtatgagaaaggccggaaccactacacagagagcatctccgtggccaaaatcagtgtctatgggacactctgagctgtgccactgccacaggggtattctgccttcaggactctgccttcaggaa

SEQ ID NO: 10862 - DNA, 201 bp, Artificial Sequence
  Synthetic polynucleotide
cagccgccgccagccgcagccatgggccgggcccggccgggccaacgcgggccgcccagccccggccccgccgcgcagcctcccgcgccaccgcgccgccgcgcccgttccctggcgctgctcggagccctgctggccgccgccgctgccgccgccgtccgggtctgcgcccgccacgccgaggcccaggcggccgcgcgg

SEQ ID NO: 10863 - DNA, 206 bp, Artificial Sequence
  Synthetic polynucleotide
ccaccctgagcaatggcggctgccagtatctgtgcctccctgccccgcagatcaacccccactcgcccaagtttacctgcgcctgcccggacggcatgctgctggccagggacatgaggagctgcctcacaggtgtggcacacgccttgtttctgcgtcctgtgtcctccaactgccccctcctgagcctctctctgctcatctgt

SEQ ID NO: 10864 - DNA, 201 bp, Artificial Sequence
  Synthetic polynucleotide
catcccccgggctcaggaggctgctctgctcccccaggtcttcacctcagacactgaggcctccagtgagtccgggcttcacacgccggcatctcaggccaccaccctccacgtccccagccaggaccctgccagcatccagcacctgcagccggcccaccggctcagcgccagccccacaggtgagaggccctggctcca

SEQ ID NO: 10865 - DNA, 213 bp, Artificial Sequence
  Synthetic polynucleotide
ttccctccccatagttaccgtacacgagaagaaattcaggaagtaagaagtaagagtgaccctattatgcttctcaaggacaggatggtgaacagcaatcttgccagtgtggaagaactaaaggtacagtcacttgttcatggtggtttgaaggttggctttaaaagttgccacccctgggtggccacagagtttgtgtgggttcctccaagc

SEQ ID NO: 10866 - DNA, 201 bp, Artificial Sequence
  Synthetic polynucleotide
tttgttatatataaatattagtttatatgttcataattattttcaacgtatattacagagtattaaagaatctgaagaggaactatattgtgcctattctttggcttaatgaggtttgtatttgcagctgttagtcattaaaaacaaccttctttgtatataaacaagctcttgatgtttcaaaagaatgtatagtattta

SEQ ID NO: 10867 - DNA, 201 bp, Artificial Sequence
  Synthetic polynucleotide
gagctggctctgctgcagcagcctgaggaccagcctgactctgccctcccagaaatcctgcagtttaacctgctgggggtgcctctggtcggggccgacgtctgcggcttcctgggcaacacctcagaggagctgtgtgtgcgctggacccagctgggggccttctaccccttcatgcggaaccacaacagcctgctcagt

SEQ ID NO: 10868 - DNA, 209 bp, Artificial Sequence
  Synthetic polynucleotide
tgggatacatactactgaatgcaaaggacaccacacacacgcatgtgcacacacacacacgctttttacctgagtggttaaaatgtcactctgagaggatagccctgagcagtcttcagagacgcttgtttcactctcacacccagatgctgcttcaccttaaataacaaaaacagaggttcagatgtaaaagcagactataaacgctg

SEQ ID NO: 10869 - DNA, 200 bp, Artificial Sequence
  Synthetic polynucleotide
tgccaatctcatcttgttttctgcgcaagttaggttttgtcaagaaagggtgtaacgcaactaagtcatagtccgcctagaagcatttgcggtggacgatggaggggccggactcgtcatactcctgcttgctgatccacatctgctggaaggtggacagcgaggccaggatggagccgccgatccacacggagtacttg

SEQ ID NO: 10870 - DNA, 201 bp, Artificial Sequence; identical to SEQ ID NO: 10793
  Synthetic polynucleotide

SEQ ID NO: 10871 - DNA, 201 bp, Artificial Sequence
  Synthetic polynucleotide
agaaaaaaagaatgacaaggttcacttttgatgatacggggtgttattaataagacatgtttcctttttggtactagggtgctcctggtgctgtaggtgcccctggtcctgctggagccacaggtgaccgggtaagcatgcattttcactaagccaacagcaatatctaaaatttcccgccttccctagtcccaaagagcc

SEQ ID NO: 10872 - DNA, 201 bp, Artificial Sequence
  Synthetic polynucleotide
cgaattcgtgctcaaggagggccagctgctgtgcaagggtgactacgagaaggagaaggacctgctcagctccgtgagccccgacgagtccgactccggtgaggcctggcctgagctgggggcaggcctcagggacgggggttgctggggtgtcctggaggggagtcccggctggagaagccacctcctgcttccaggacc

SEQ ID NO: 10873 - DNA, 201 bp, Artificial Sequence
  Synthetic polynucleotide
cggccagggtgcagtgtcaggacccccccggaagcctcctgggactgtcgctggcacagcccgaggccctgaaggtggcagcacggctcaggtgccagcacccacagcatcaccaccgccggagggtccagtgctcactttccagagtgagaagatgaagggcatgaaggagctgctggtggccaccaagatcaactcgag

SEQ ID NO: 10874 - DNA, 203 bp, Artificial Sequence
  Synthetic polynucleotide
ctttaaaatcaattctagcgcctttcttgttcatttttatctcagagcaggagttgttgggggcacctttcgagttctcaaggtaagctgagcttgctcctttcttggagggatgaggatcacagagttttgcattaatcttataaagctcgagggctttaatagctgctgcattattatccatacgaagaaaagttggacag

SEQ ID NO: 10875 - DNA, 201 bp, Artificial Sequence
  Synthetic polynucleotide
ccacctccgtcctgaccactggccactccccttccacagaaccacgcctttcgcctgctgaagccggggggcgtcctcacctactgcaacctcacctcctggggggagctgatgaagtccaagtactcagacatcaccatcatgtttgaggtgcgcccacctgaagttccccatgggtctccaggaagtgaccttggatgg

SEQ ID NO: 10876 - DNA, 201 bp, Artificial Sequence
  Synthetic polynucleotide
gggcggggtgggggcccctgggctcccagggtgggagctggctccgaggctggctggctccgcaggtccgctgacgtcgccgcccagatggcctccaggctgaccctgctgaccctcctgctgctgctgctggctggggtatgtggtcccttgtgggatgggggacgggggtggagacgggaggcgggatggtgcggggtg

SEQ ID NO: 10877 - DNA, 201 bp, Artificial Sequence; identical to SEQ ID NO: 10723
  Synthetic polynucleotide

SEQ ID NO: 10878 - DNA, 207 bp, Artificial Sequence
  Synthetic polynucleotide
aatacagcaagtgtgacctgcccctgaggaccctggagagcctgttgagtgggctgggcccagccggcccttttgatatggtgtactggacaggagacatccccgcacatgatgtctggcaccagactcgtcaggaccaactgcgggccctgaccaccgtcacagcacttgtgaggaagttcctggggccagtgccagtgtaccctg

SEQ ID NO: 10879 - DNA, 201 bp, Artificial Sequence
  Synthetic polynucleotide
cgaaattgtgtcaacacataaaactagttccgtgtatgtcttctcaattgaatgttttcatcttagggccctgctggccctgctggtgctcccggtcctgctggttcccgaggtgctcctgtaagttttgtcattttttggttttattttgttttgttctttttttaactcattctacagtgtaggaaatattttattttc

SEQ ID NO: 10880 - DNA, 206 bp, Artificial Sequence
  Synthetic polynucleotide
tctccagccccagctgctcaccatcgctatctgagcagcgctcatggtgggggcagcgcctcacaacctccgtcatgtgctgtgactgcttgtagatggccatggcgcggacgcgggtgccgggcgggggtgtggaatcaacccacagctgcacagggcaggtcttggccagttggcaaaacatcttgttgagggcaggggagtac

SEQ ID NO: 10881 - DNA, 212 bp, Artificial Sequence
  Synthetic polynucleotide
gcggctcgggcacactggacgtacctgtgggggaaggagctggatgtgcaggccccgcccaccccgccgcaggccacctacggccccgcggtcacgctacctggcgcggctcgcggcgtctgggtttgtgttgtcgatggcgacccgtttcccttgcttcagggctgtctcacacgtggtcacacagcgctgccaggagcctagcgtgtcct

SEQ ID NO: 10882 - DNA, 201 bp, Artificial Sequence
  Synthetic polynucleotide
tattctcattgcagtggtcttccaaatatttatgtcaatttcaccccaagctgtacctttgagggagaaaacactgtcatgatgctccagacggctaggtgagagtcaaatcctcgattcctcccatctgttcataagaatgttctagtccttttcctaggttcttgttcccatggtttttcttcaccgtatatatatatt

SEQ ID NO: 10883 - DNA, 201 bp, Artificial Sequence
  Synthetic polynucleotide
agcaatccagagcggccatcaacaaatgggtgtccaataagaccgaaggccgaatcaccgatgtcattccctcggaagccatcaatgagctcactgttctggtgctggttaacaccatttacttcaaggtactcagaatggccctggagagaccccagggacttcctcttgctcttcagcttaccccctttttttttaaat

SEQ ID NO: 10884 - DNA, 201 bp, Artificial Sequence
  Synthetic polynucleotide
caaaataatcgatcttgttagtaaacgtgatggaaacagctcgctgattgctgccgttgcagaagtaagagttcagaggcggcctctgaagaacagaacaggtaggtgtcaagtgggactagtttgtgtgatgatagtagatgatctcattatactattcaataaagccatcaggtcgagggattatctggcagtgcccta

SEQ ID NO: 10885 - DNA, 201 bp, Artificial Sequence
  Synthetic polynucleotide
agaatgagactctgtctcaaaaacaaacaaaaatttcttttcctaggaactaacaaaacattgtgtctttcttttgaagattatgtgatagaaaagctggagcaatgcgggttctttgacgacaacattagaaaggacacattctttttgacggtccatgatgctatactctatctacagaaccaagtgaaatctcaagag

SEQ ID NO: 10886 - DNA, 201 bp, Artificial Sequence; identical to SEQ ID NO: 10758
  Synthetic polynucleotide

SEQ ID NO: 10887 - DNA, 201 bp, Artificial Sequence
  Synthetic polynucleotide
gggagtctgggcttcaggctgggatggggtctgtggagctgaggcggccccctgcccaccaggtcatggtattcccgggcctgcgtctgagccgtgaagccttcctcaccacggccgaatttgggacccaggagctccggcggcccgcccagctgcggctgcaggtgtaccggctcctcagcacagcaggtgggactctgg

SEQ ID NO: 10888 - DNA, 201 bp, Artificial Sequence; identical to SEQ ID NO: 10749
  Synthetic polynucleotide

SEQ ID NO: 10889 - DNA, 201 bp, Artificial Sequence
  Synthetic polynucleotide
ttcttgtcaaaaagatgctgttggaagcctctacgaagccagaaatgagtactgttatcaacaataccagaggaataattttttatagtgtccctcatcatggatcacgtttggctgaatactctgttaatattcgctatcttctcttcccctcgttggaagtcaaagaactcagcaagggtaatactttttgtcataaag

SEQ ID NO: 10890 - DNA, 201 bp, Artificial Sequence
  Synthetic polynucleotide
ctataaattcattaagggagcttgtcctaaaagctatggctttaatgcagcaaggcttgctaatctcccagaggaagttattcaaaagggacatagaaaagcaagagaatttgagaagatgaatcagtcactacgattatttcggtaactaactaactataatggaattataactaactgaccttaagtttcaaagaaaca

SEQ ID NO: 10891 - DNA, 212 bp, Artificial Sequence
  Synthetic polynucleotide
tggtcaggtcgagggccaggcctcagagcggcccctgtgtccacgcaggtgtttggtcttgggaacaagacctacgagcacttcaatgccatgggcaagtacgtggacaagcggctggagcagctcggcgcccagcgcatctttgagctggggttgggcgacgacgatgggaagtgagtgcccaccctgccaccatgatcagcgcggcgggc

SEQ ID NO: 10892 - DNA, 200 bp, Artificial Sequence
  Synthetic polynucleotide
agctagggagcagggctgatgccagagctccgctaaaggctgctctctcaacaagaggaacgatttaagtcttggggcacgccctgccagctcaccttcctgcagccgcacctgccgcagccgtgggggccccagctctgggctggactggttcccgtggacgtagggcagcagcacgtgggccatccatggccagagct

SEQ ID NO: 10893 - DNA, 201 bp, Artificial Sequence; identical to SEQ ID NO: 10748
  Synthetic polynucleotide

SEQ ID NO: 10894 - DNA, 201 bp, Artificial Sequence; identical to SEQ ID NO: 10717
  Synthetic polynucleotide

SEQ ID NO: 10895 - DNA, 201 bp, Artificial Sequence
  Synthetic polynucleotide
catgaagcgcggcgcatgatcgagggcgtggtgtacgagatgcgcgtctacgcggtcaacgccatcggcatgtccaggcccagccctgcctcccagcccttcatgcctatcggtgagcctgcctggcctggtcctgccccccgccccctccccagttaaaaacctccaataatagcaggtgctctgcaggcagccatgcta

SEQ ID NO: 10896 - DNA, 201 bp, Artificial Sequence
  Synthetic polynucleotide
agattctggaagtcttctctggagatcttctcagattgcatgcccaatcacattgccgttgccctggcagccacccgcgggtccaccctttggcacagcggtactgcattcctaatgatgcaggagacacagctgataatagagtgtcacggttgaatcctgaagcccatcctctctcttttgtcaatgataatgatgttg

SEQ ID NO: 10897 - DNA, 201 bp, Artificial Sequence
  Synthetic polynucleotide
aagtggatacctttgggctgagcctctactttccctccaaaataactgcctccgctgtgacctttgatcaccagggaaatgtgattgttgcagatacatctggtccagctatcctttgcttaggaaaacctgaggagtttccagtaccgaagcccatggtcactcatggtctttcgcatcctgtggctcttaccttcacca

SEQ ID NO: 10898 - DNA, 201 bp, Artificial Sequence
  Synthetic polynucleotide
ttggcaggactttgaaatggatgtggtggcaatggtgaatgacacggtggccacgatgatctcctgctactacgaagaccatcagtgcgaggtcggcatgatcgtgggtaagggctccttgcacccctgccccttccagactgctgaggctccctgtgtacaacaggcttcaagggccctgtggggtgaggaccaaactac

SEQ ID NO: 10899 - DNA, 200 bp, Artificial Sequence; identical to SEQ ID NO: 10892
  Synthetic polynucleotide

SEQ ID NO: 10900 - DNA, 201 bp, Artificial Sequence; identical to SEQ ID NO: 10807
  Synthetic polynucleotide

SEQ ID NO: 10901 - DNA, 201 bp, Artificial Sequence
  Synthetic polynucleotide
tctccatacaggtcttctttggcaatgtggattcatctgggataaaacacaatatttttaaccctccaattattgctcgatacatccgtttgcacccaactcattatagcattcgcagcactcttcgcatggagttgatgggctgtgatttaaatagtaagtgccaagtcatcccatatccttcttccctcaaccatgggt

SEQ ID NO: 10902 - DNA, 201 bp, Artificial Sequence
  Synthetic polynucleotide
cagtcccctgcgcccaggcctagctactatgggcacccagcctgctacacaccaccccatccccacctacccctcctatgtgccggcggctgcccacgactacagcagcggactcttccaccccggaggcttcctggggggaccggcctccagcttcacccctaagcagcgcagcaaggctcgttcctgttcaggtaaagg

SEQ ID NO: 10903 - DNA, 201 bp, Artificial Sequence; identical to SEQ ID NO: 10713
  Synthetic polynucleotide

SEQ ID NO: 10904 - DNA, 209 bp, Artificial Sequence
  Synthetic polynucleotide
ccttttcccttccacctctttttggcttgtgctcctggcccctgagccctccccacaacctctgtcctccttaggttttcgtcatcgaggtgaagacaaaaggaggatccaagtacctcatctaccgccgctaccgccagttccatgctttgcagagcaagctggaggagcgcttcgggccagacagcaagagcagtgccctggcctgt

SEQ ID NO: 10905 - DNA, 201 bp, Artificial Sequence; identical to SEQ ID NO: 10839
  Synthetic polynucleotide

SEQ ID NO: 10906 - DNA, 209 bp, Artificial Sequence
  Synthetic polynucleotide
gttaggccacttcactgggtcatgattcacagaccactggttgacaaaaaccacagtgtccttgggaatgtggtagcccaagacagaggtgttggcagtggtggcatgaggaatagtgacaggcacaaagctggagaagcgcatggcttcataaaggaaggccaggacatagggcaggttgggctggtcacccatacaaggcagacggt

SEQ ID NO: 10907 - DNA, 201 bp, Artificial Sequence
  Synthetic polynucleotide
caatgccaccaaaggctgtgacgagtctgtggatgaggtcacagcaccatgtagctgccaagactgctctattgtctgtggccccaagccccagcccccacctcctcctgctccctggacgatccttggcttggacgccatgtatgtcatcatgtggatcacctacatggcgtttttgcttgtgttttttggagcattttt

SEQ ID NO: 10908 - DNA, 201 bp, Artificial Sequence
  Synthetic polynucleotide
tgacccttccttcttgaccccatcgcaggcaggggtgtggggaagaacgaggaactgcgtctttatcaccatctcttcaacaactatgacccaggaagccggccagtgcgggagcctgaggatactgtcaccatcagcctcaaggtcaccctgacgaatctcatctcactggtaagctacccccaccctcatcttaagcca

SEQ ID NO: 10909 - DNA, 201 bp, Artificial Sequence
  Synthetic polynucleotide
gtgacctctcgtgtccccaggacacgctaggctcctggcagcgctgtgtgaccacgtgtgagacagccctgaagcaagggaaacgggtcgccatcgacaacacaaacccagacgccgcgagccgcgccaggtagcgtgaccgcggggccgtaggtggcctgcggcggggtgggcggggcctgcacatccagctccttcccc

SEQ ID NO: 10910 - DNA, 213 bp, Artificial Sequence; identical to SEQ ID NO: 10800
  Synthetic polynucleotide

SEQ ID NO: 10911 - DNA, 209 bp, Artificial Sequence; identical to SEQ ID NO: 10868
  Synthetic polynucleotide

SEQ ID NO: 10912 - DNA, 201 bp, Artificial Sequence; identical to SEQ ID NO: 10846
  Synthetic polynucleotide

SEQ ID NO: 10913 - DNA, 201 bp, Artificial Sequence
  Synthetic polynucleotide
tcctggagttccagccactggccggcaaccttgctctcaccttgctctccccactggcccaggtgcggcagaaggtgcgcatagtgagccgagaggccgaggcggccgaggccgaggagccgtggggcgaggaagcccgggaaggccggcggcggggcccacggcgggagtccaagccagaggagcccccgccgcccaaga

SEQ ID NO: 10914 - DNA, 201 bp, Artificial Sequence
  Synthetic polynucleotide
cccctttgactctgtggagccgcctaaaagacccaccagcagactcatcatgcacagcatggccatgttcggaagagagttctgctacgcggtggaggcagcgtatgtgaccccagtcctgctcagcgtaggtctgcccagcagcctgtacagcattgtgtggttcctcagccccatcctgggattcctgctgcagcccgt

SEQ ID NO: 10915 - DNA, 201 bp, Artificial Sequence
  Synthetic polynucleotide
caagagctgctgcaggcctacggcaaggactacatcgagcacttgcatgggcagttcctgcactcgctacgcctggccatgtccgacctcaccccagttgtagatgccatcacagatgcgctgctggcagctcggccccgccgccgctattaccccggccagggcctggggctcatgtacttcatccactactacctgcct

SEQ ID NO: 10916 - DNA, 213 bp, Artificial Sequence
  Synthetic polynucleotide
ctgggaaagcactggagaaatgggatttgtttaaactatgacagcattatttcttgttcccttgtcctttttcctgcaagcaggaagggaacctgattggattaccccttctgattgacaactatgtgccccctttggagggactgcctatcttcattcttcgactagccactgaggtcagtgatcaagcagatactaagcatttcggtacat

SEQ ID NO: 10917 - DNA, 201 bp, Artificial Sequence
  Synthetic polynucleotide
tcctcttctatgtctcgtggctgcagcaccagcctaggaattcccgggcccgggggccccgtcgtgcctctgctgccggcccccgtgtcaccgtcctggtgcgggagttcgaggcatttgacaacgcggtgcccgagctggtagactccttcctgcagcaagacccagcccagcccgtggtggtggcagccgacacgctcc

SEQ ID NO: 10918 - DNA, 201 bp, Artificial Sequence
  Synthetic polynucleotide
gaaatgtctctcttctattctaggggagtatatctctgaaagaactgaatgcccgacccttagaagttttcatgtgtagtgtgctcaaaagacaaggttacggagaaggcttccgctggatggcacagtacattgattaacacaaactcacattggttccaggtctcaacgttcaggcttactcagagatttgattgctca

SEQ ID NO: 10919 - DNA, 201 bp, Artificial Sequence
  Synthetic polynucleotide
tgctgtctcagctggcctcgtcctgggctccgaacatgagacccgtctggtggcaaagctatttaaagactacagcagcgtggtgcggccagtggaagaccaccgccaggtcgtggaggtcaccgtgggcctgcagctgatacagctcatcaatgtggtgagacaagagcactgggggcctgcccacacacccacacctct

SEQ ID NO: 10920 - DNA, 201 bp, Artificial Sequence
  Synthetic polynucleotide
tcgggaaaccagagaatatgactttattgctgcacaattcaaatacttttctttctacaacatgtatatagtcacccagaaagcagactacccgaatatccagcacttactttacgacctacacaggagtttcagtaacgtgaagtatgtcatgttggaagaaaacaaacagcttcccaaaatgtggctgcactacttcag

SEQ ID NO: 10921 - DNA, 201 bp, Artificial Sequence
  Synthetic polynucleotide
accctggctatgccatggtgcggctggtcaagtgcgacgtctacccctgccccaacacagtggactgcttcgtgtcccgccccaccgagaaaaccgtcttcaccgtcttcatgctagctgcctctggcatctgcatcatcctcaatgtggccgaggtggtgtacctcatcatccgggcctgtgcccgccgagcccagcgcc

SEQ ID NO: 10922 - DNA, 201 bp, Artificial Sequence
  Synthetic polynucleotide
tctgtctctttcagtcaggcctgggtctctcaagcttttgtgtctgtgcctgtctgagcccccatgggtgctgcctcttccccctgcaggagactactggattgaccccaaccaaggctgcaccttggacgccatgaaggttttctgcaacatggagactggcgagacttgcgtctaccccaatccagcaaacgttcccaa

SEQ ID NO: 10923 - DNA, 207 bp, Artificial Sequence; identical to SEQ ID NO: 10878
  Synthetic polynucleotide

SEQ ID NO: 10924 - DNA, 201 bp, Artificial Sequence
  Synthetic polynucleotide
acccgcccgcccgcccctatgaccaacatgagctggagcttcctgacgcggctgctggaggagatccacaaccactccaccttcgtgggcaaggtgtggctcacggtgctggtggtcttccgcatcgtgctgacggctgtgggcggcgaggccatctactcggacgagcaggccaagttcacttgcaacacgcggcagcca

SEQ ID NO: 10925 - DNA, 201 bp, Artificial Sequence
  Synthetic polynucleotide
tggtggccagcagcagctacaacatggtcatccgggaggacaaccagaccaaccgcctgcaggaggctctgaacctcttcaagagcatctggaacaacaggtttgtggagtgaccgcccaccccctgcgcttgcccaggaggccctggtctgcactgtttatagagaagaaccccgtgcaagcattccagacccctggccg

SEQ ID NO: 10926 - DNA, 201 bp, Artificial Sequence; identical to SEQ ID NO: 10876
  Synthetic polynucleotide

SEQ ID NO: 10927 - DNA, 201 bp, Artificial Sequence
  Synthetic polynucleotide
tctggcaccggaggtggcggcggcggcggcggggcgagcggcgggactagcggcagctgcagccccgcgtcctcggagccgccggctgcgcccgccgaccgcctgcgcgccgagagcccgtcgccgccgcgcctgctggccgcgcactgcgcgctgctgcccaagccgggcttcctgggcgcgggcggcggcggcggcggc

SEQ ID NO: 10928 - DNA, 201 bp, Artificial Sequence; identical to SEQ ID NO: 10727
  Synthetic polynucleotide

SEQ ID NO: 10929 - DNA, 201 bp, Artificial Sequence; identical to SEQ ID NO: 10761
  Synthetic polynucleotide

SEQ ID NO: 10930 - DNA, 201 bp, Artificial Sequence; identical to SEQ ID NO: 10909
  Synthetic polynucleotide

SEQ ID NO: 10931 - DNA, 201 bp, Artificial Sequence
  Synthetic polynucleotide
ttcaccggcctctcggggctccgccgactcttcctcaaggacaacggcctcgtgggcattgaggagcagagcctgtgggggctggcggagctgctggagctcgacctgacctccaaccagctcacgcacctgccccaccgcctcttccagggcctgggcaagctggagtacctgctgctctcccgcaaccgcctggcagag

SEQ ID NO: 10932 - DNA, 201 bp, Artificial Sequence
  Synthetic polynucleotide
catgcactggctgtccaccatcatccccacgcaccacatcaacgcgctcatcttcttcttcatcgtcagcaacctcaccatcgacttcttcgccttcttcatcccgctggtcatcttctacctgtccttcatctccatggtgatctgcaccctcaaggtgttccaggacagcaaggcctgggagaacttccgcaccctcac

SEQ ID NO: 10933 - DNA, 201 bp, Artificial Sequence
  Synthetic polynucleotide
ttgatgttgctacccatgttcccctgatattctatgttcctggaaggacggcttcacttccggaggcaggcgagaagcttttcccttacctcgacccttttgattccgcctcacagttgatggagccaggtataaaatatgctgaaatgatattgcttgacagtaagatcacctttagtttatatgtgaaccactttattg

SEQ ID NO: 10934 - DNA, 201 bp, Artificial Sequence
  Synthetic polynucleotide
ttttaattgaagtttcctttttttccttgcagaatccaagaaaacaggggcccgaaacccaaggcagtacagcagaattaattacagggctcgtccaactggtccctcagtcacacatgccagagattgctcaggaagcaatggaggtaaggggaaaatgaattccatgttcttgaaggaaagattgtaactatgtacatt

SEQ ID NO: 10935 - DNA, 201 bp, Artificial Sequence
  Synthetic polynucleotide
ggtggggggagctgacctagtggaagctgagcctcagtgtccccctccctcagccacccaacctccttcggagcagccgggaacagatggccagctggccctgatcctgggccccgtgctggccttgctggccctggtggccctgggtgtcctgggcctgtggcatgtccgacggaggcaggagaagcagcgtggcctgca

SEQ ID NO: 10936 - DNA, 201 bp, Artificial Sequence; identical to SEQ ID NO: 10717
  Synthetic polynucleotide

SEQ ID NO: 10937 - DNA, 201 bp, Artificial Sequence; identical to SEQ ID NO: 10879
  Synthetic polynucleotide

SEQ ID NO: 10938 - DNA, 201 bp, Artificial Sequence
  Synthetic polynucleotide
tctaacttttcattgtcctcaaagattaagattcttaaacatgttcctgaaggtgctgagacagagcaaggccttaaacgggagcttcaagttcttaggtacatcatgtattcatatgactactttgtttttttctttaaaaaaaaaattattagtttttatatactccgaattgctacaactagagacaagcatttttcg

SEQ ID NO: 10939 - DNA, 201 bp, Artificial Sequence; identical to SEQ ID NO: 10814
  Synthetic polynucleotide

SEQ ID NO: 10940 - DNA, 201 bp, Artificial Sequence
  Synthetic polynucleotide
cactacctgcagttggccggcgacacggatgaagaactcaacagctgcaccgctgtggactggctggtcctcgccgcgaagcagggccgtcgcgaggctgtgaagctgcttcgccggtgcttggcggacagaagaggtgggtctgtgtgaggcttagaacagcctctggagggttgagcagcttgtaatgctgcttgctaa

SEQ ID NO: 10941 - DNA, 201 bp, Artificial Sequence
  Synthetic polynucleotide
cccggcctggggctctgtgtgtttcagcactctacccagaccctcccggccccagggtccacacgtgctcggccgcaggaggcttcagcaccagcgattacgacgttggctgggagagtcctcacaatggctcggggacgtgggcctattcagcgccggatctgctggggtgagcagagcgagggccccgggcgtctacgc

SEQ ID NO: 10942 - DNA, 201 bp, Artificial Sequence
  Synthetic polynucleotide
ccaggccgccggggaagccatggtgggtgcctcaaggccaccccccaagccgctgcgtccgcggcagctgcaggaggttggccgccagagctcctcggacagcggcatcgccactggcagccactcctcttactccagcagcctctcgtcctacgcgggcagcagcctggacgtgtggcgggccacagatgaactgggctc

SEQ ID NO: 10943 - DNA, 201 bp, Artificial Sequence
  Synthetic polynucleotide
ccaccacatccacccaggtcatggtgatcaaacgccccggcaggaagcgaaaagctgaggccgaccctcaggccattcccaagaaacggggccgaaagccggggagtgtggtggcagccgctgccgccgaggccaaaaagaaagccgtgaaggagtcttctatccgatctgtgcaggagaccgtactccccatcaagaagc

SEQ ID NO: 10944 - DNA, 201 bp, Artificial Sequence
  Synthetic polynucleotide
tacttttccctccccatagttaccgtacacgagaagaaattcaggaagtaagaagtaagagtgaccctattatgcttctcaaggacaggatggtgaacagcaatcttgccagtgtggaagaactaaaggtacagtcacttgttcatggtggtttgaaggttggctttaaaagttgccacccctgggtggccacagagtttg

SEQ ID NO: 10945 - DNA, 201 bp, Artificial Sequence
  Synthetic polynucleotide
gggtggcttgcagcctggcccattttccctccccaggagtatggggcacccatcgtggaccccattaacgacatccgcatcattgccgtggtctcggtcactgtgctgctggccatctccctggctggcatggagtgggagtccaaggtgaggaggccatggaggagggggacatggaggtggtcacgtggagaagcgggg

SEQ ID NO: 10946 - DNA, 201 bp, Artificial Sequence; identical to SEQ ID NO: 10873
  Synthetic polynucleotide

SEQ ID NO: 10947 - DNA, 205 bp, Artificial Sequence
  Synthetic polynucleotide
cttcggccggttcaaggtgaacagcgaggaggaggaggaggacgcactgaccctgtcctcggccatgtggttctcctggggcgtcctgctcaactccggcatcggggaaggtaaggccccgcccggcccgcctggtcccgcctcggccctctagggtctgacagagccccccgcccgcccacaggcgcccccagaagcttctcag

SEQ ID NO: 10948 - DNA, 201 bp, Artificial Sequence; identical to SEQ ID NO: 10802
  Synthetic polynucleotide

SEQ ID NO: 10949 - DNA, 201 bp, Artificial Sequence
  Synthetic polynucleotide
gatggacatccattcctggctgtattcatgtgttgttgttgttattgttttaattgttcttatttacatgcaggttattggttgaattcccagcaacaggtggtgtgattccatcttggcaatttcagcctttaaagctgatccgatatgtcacaacttttgatttcttcctggcagcctgtgagattatcttttgtttct

SEQ ID NO: 10950 - DNA, 200 bp, Artificial Sequence; identical to SEQ ID NO: 10869
  Synthetic polynucleotide

SEQ ID NO: 10951 - DNA, 201 bp, Artificial Sequence
  Synthetic polynucleotide
catgatttcctgctggttccccgagagctgagtggctcctccccagtcctggaggagactcacccagctcaccagcagggagccagcagaccagggccccgggatgcccaggcacaccccggccgtcccagagcagtgcccacacagtgcgacgtcccccccaacagccgcttcgattgcgcccctgacaaggccatcacc

SEQ ID NO: 10952 - DNA, 201 bp, Artificial Sequence; identical to SEQ ID NO: 10802
  Synthetic polynucleotide

SEQ ID NO: 10953 - DNA, 201 bp, Artificial Sequence
  Synthetic polynucleotide
gccactggacacaggataaggcccagcgcacaggcccccacgtggacagcatggaccgcggcacgctccctctggctgttgccctgctgctggccagctgcagcctcagccccacaagtaggtgtccagggacccagggtggggagactcggcctccggtgcacggaccaggccccaagtattcccggcctccttcctgta

SEQ ID NO: 10954 - DNA, 210 bp, Artificial Sequence
  Synthetic polynucleotide
gcttagggaatagaaagtggtgtagagaatataacttcaattacttctttcatcatttttcttcctttagtccacaagccctagccatgccgtggtagccaatgttcagcttgtcttgcatctaatgaagcaacacagtaaagctttgtgcaatgatcgagtcatcaacagtattcctttggcaaagcaagtatcttcacgaggtggtaa

SEQ ID NO: 10955 - DNA, 201 bp, Artificial Sequence
  Synthetic polynucleotide
gttcctcattatatagaatgagagaacatcatttctctccttttcctcccaggtggccgtcgaggaccgagtcaggcagctgcatgaagcccacagggactttggtccagcatctcagcactttctttccagtaagtcattttcagcttttatcacttaactttattgcatcttgattaataagaataacagttgaaaaaa

SEQ ID NO: 10956 - DNA, 201 bp, Artificial Sequence
  Synthetic polynucleotide
agttcattggaacagaaagaaatggatttatctgctcttcgcgttgaagaagtacaaaatgtcattaatgctatgcagaaaatcttagagtgtcccatctggtaagtcagcacaagagtgtattaatttgggattcctatgattatctcctatgcaaatgaacagaattgaccttacatactagggaagaaaagacatgtc

SEQ ID NO: 10957 - DNA, 201 bp, Artificial Sequence
  Synthetic polynucleotide
accatgagtgactgtctttagtcaaaaaccctccccacctgaagtagcactttcattaccctagagtcaccatcctggtaaatagagggttcgttcccaggaagaaagtgaatcctgaaacccggcagaaaggccaggtaagggacatggactcttcctactttagagaaggctctgggagtccaccaggctccatgcaat

SEQ ID NO: 10958 - DNA, 201 bp, Artificial Sequence
  Synthetic polynucleotide
gatggttatggtaaaagaggtcaaatgaaaccctcgattgaatcctattctgaagatgatgaaagtaagttttgcagttatggtcaatacccagccgacctagcccataaaatacatagtgcaaatcatatggatgataatgatggagaactagatacaccaataaattatagtcttaaatattcagatgagcagttgaac

SEQ ID NO: 10959 - DNA, 201 bp, Artificial Sequence
  Synthetic polynucleotide
ataattttttggcatgtttacccaggtacccagaagctattactgaccctgcctacaaaggacagattctcacaatggccaaccctattattgggaatggtggagctcctgatactactgctctggatgaactgggacttagcaaatatttggagtctaatggaatcaaggtagtaccagtggtggccatttaaaaagtct

SEQ ID NO: 10960 - DNA, 201 bp, Artificial Sequence; identical to SEQ ID NO: 10902
  Synthetic polynucleotide

SEQ ID NO: 10961 - DNA, 201 bp, Artificial Sequence; identical to SEQ ID NO: 10757
  Synthetic polynucleotide

SEQ ID NO: 10962 - DNA, 201 bp, Artificial Sequence
  Synthetic polynucleotide
ttccttcttcaactagattacagatctgcttgatgttgtactagacagtttcatcaaaaccagtgcaacaggtggcttgggatcaataaaagctgaggtgatggcagatactgctgtagctttggcttctggaaatgtgaaattggtttcaagcaaggtaatcacttttcttttgccttctgtactatagcatatctgttt

SEQ ID NO: 10963 - DNA, 204 bp, Artificial Sequence
  Synthetic polynucleotide
ggcgataggccacggccatgtggtactggctcatggcccggtacttcaggctccagcctttgccatagttgttgacaagctctgccgccttgcaggggaagaacagggctttctcgtagtcctgcaggggacatggaatggaaggaggcaaactgagtggcagaggctgccccaagtcaagggctcctgggctaggtttctcta

SEQ ID NO: 10964 - DNA, 201 bp, Artificial Sequence
  Synthetic polynucleotide
cagggtcgtcagacaccaaaacatatttctgaaagtctaggagctgaggtggatcctgatatgtcttggtcaagttctttagctacaccacccacccttagttctactgtgctcataggtaataatagcaaatgtgtatttacaagaaagagcagatgaggttgataattgtcatctctaatacttctgttaaaaggaaat

SEQ ID NO: 10965 - DNA, 201 bp, Artificial Sequence
  Synthetic polynucleotide
gaccctcatgccaccccactgcaggagacgcttcatctgaaggaaaaggagggctgcccccaggccttccacgccctcctgtcctggctgctgacccaggactccacagccatcctggacttctggagggtgctgttcaaggactacaacctggagcgctatggccggctgcagcccatcctggacagcttccccaaaggt

SEQ ID NO: 10966 - DNA, 201 bp, Artificial Sequence
  Synthetic polynucleotide
aggagcttcaaggaggctttgcggggcagagctggggctgggtgcagcctgaggtgtccacctggccttcccaggccccctgctgccataccaagccgagttcctggtgcgcagccacgatgcggaggaggtgctgccctcaacacctgccagccgcttcctctcagccttggggggactctgggagcccggagagcttca

SEQ ID NO: 10967 - DNA, 201 bp, Artificial Sequence
  Synthetic polynucleotide
ccctaggagggacttcccaaccctgacaggcggcgggcaggtgggcagggcctcgcagtccagcttccccaccttgtctgcctccacagggggactccggcagccccttggtctgcaacgggctaatccacggaattgcctccttcgtccggggaggctgcgcctcagggctctaccccgatgcctttgccccggtggcac

SEQ ID NO: 10968 - DNA, 201 bp, Artificial Sequence
  Synthetic polynucleotide
gctttggcccttggtgataggtggctcggcccgccctacctggcaccctgaccctggtcacggcctctccctccagcaggatacagacgtccctcaccagtgccagcttggggtctgcagatgagaactccgtggcccaggctgacgatagcctgaaaaacctccacctggagctcacggaaacctgtctggacatgatgg

SEQ ID NO: 10969 - DNA, 201 bp, Artificial Sequence; identical to SEQ ID NO: 10895
  Synthetic polynucleotide

SEQ ID NO: 10970 - DNA, 201 bp, Artificial Sequence
  Synthetic polynucleotide
aaaatagcccagtataagcgggagtgcccgtccatctttgcttgggaaatccgagacagattactgtccgagggggtctgtaccaacgataacataccaagcgtaagttcattgagaacatctgccctccctgccctaagcccaatgctctctcctctttacctcctcccaccctctctctccactgtctcttagtctgtg

SEQ ID NO: 10971 - DNA, 201 bp, Artificial Sequence
  Synthetic polynucleotide
acctcaagaaggccctgctcctccagggctccaacgagatcgagatccgcgccgagggcaacagccgcttcacctacagcgtcactgtcgatggctgcacggtgagtgcccagaatccccaggcagggccccacctctccggccttgggctttttggccaggccatagtgccctctctccatcactcccacgtggtaatgc

SEQ ID NO: 10972 - DNA, 201 bp, Artificial Sequence
  Synthetic polynucleotide
gtgatcccggtgggcattgggccccatgccaacctcaagcagatccgcctcatcgagaagcaggcccctgagaacaaggccttcgtgctgagcagtgtggatgagctggagcagcaaagggacgagatcgttagctacctctgtgaccttgcccctgaagcccctcctcctactctgccccccgacatggcacaagtcact

SEQ ID NO: 10973 - DNA, 201 bp, Artificial Sequence
  Synthetic polynucleotide
ggatactgcacggacttccaggcagtgccaggctgtggaattgggtgcaaagtcagcaacgtggaaggcatcctggcccacagtgagcgccctttgagtgcaccggccagtcacctgaatgaggctggcagccttcccgcagaaaaaggtattgctggcttttgtctctgcagctggttaaaagtagaggtgggtcaaacc

SEQ ID NO: 10974 - DNA, 204 bp, Artificial Sequence
  Synthetic polynucleotide
gacttagcatgttttcctttaacatttttctagaaaacagaatcttggcattgtcttcctcaagaaatggactcttcccaaaccttggatacatcccagactaggtttaatgtgagaacggaagatactgaagtgacagacttcccctctctggaggagggcatattgacgcaatcagaaaatcaagtaaaggaacccaacaga

SEQ ID NO: 10975 - DNA, 208 bp, Artificial Sequence
  Synthetic polynucleotide
cagagggcagaggcctagcaactgcccctccccctgcagcagtggtgcgactatcgcctgcgctgggatccgcgagactacgaaggcctgtgggtgctgagggtgccgtccaccatggtgtggcggccggatatcgtgctggagaacaagtgaggagggggtgcaggcaggggtgtgggggacaaaggacacagggtctgggcccagc

SEQ ID NO: 10976 - DNA, 201 bp, Artificial Sequence
  Synthetic polynucleotide
cccccaggcctgggggcagaatctgccataaccagcttcgtgtctccagggcggcgtgatggatgacaagagtgaagattccatgtccgtctccaccttgagcttcggtgtgaacagacccacgatttcctgcatattcgactgtaagtgaggcttcgaggcctctatggggtgataagggtgtgtcaccttatgcttctg

SEQ ID NO: 10977 - DNA, 201 bp, Artificial Sequence
  Synthetic polynucleotide
aaaatcactgtaaagacatgtggttctttatttataggcattttggaactgggtagaaaattatccagatgaatttacaaaactgtaccagatcccacagactgatatggctggtaaggatacgattgattttttttttttttttgtcttttaaatgcctacttgtgacataaaaacctatcatcgttttccaagttattt

SEQ ID NO: 10978 - DNA, 203 bp, Artificial Sequence
  Synthetic polynucleotide
ttattattagaaaaataatgagctcagtatttaccaagacagatccttcctgtggcatccaaagtcattccactgggacactgacacttgaatgaccccctagtgttaacacacaggccatttttacacactcctgggaacacttcacattcatctatatctaaaaagaaaaaaaaagtataaagttaatatatctttataat

SEQ ID NO: 10979 - DNA, 201 bp, Artificial Sequence; identical to SEQ ID NO: 10942
  Synthetic polynucleotide

SEQ ID NO: 10980 - DNA, 201 bp, Artificial Sequence
  Synthetic polynucleotide
cgtacacgagaagaaattcaggaagtaagaagtaagagtgaccctattatgcttctcaaggacaggatggtgaacagcaatcttgccagtgtggaagaactaaaggtacagtcacttgttcatggtggtttgaaggttggctttaaaagttgccacccctgggtggccacagagtttgtgtgggttcctccaagcccagaa

SEQ ID NO: 10981 - DNA, 201 bp, Artificial Sequence
  Synthetic polynucleotide
tcacagagtatcatgtctcccttgttgctcctttcaggtaaagaagcagattttagatgaaaagatctactgccctcctgaggcttctgtgctcctggcttcttacgccgtccaggccaaggtaggctcaaagaagaaaaatgtatttttcctgggcgttaatttgggtcatgggatcactcctatcttctctttctttgg

SEQ ID NO: 10982 - DNA, 209 bp, Artificial Sequence; identical to SEQ ID NO: 10904
  Synthetic polynucleotide

SEQ ID NO: 10983 - DNA, 201 bp, Artificial Sequence
  Synthetic polynucleotide
tttagactccagaactccccacttgccgcgttctcgccgccgcaggctcccgggacgatggtgccccgcctgctgctgcgcgcctggccccggggccccgcggttggtccgggagcccccagtcggcccctcagcgccggctccgggcccggccagtacctgcagcgcagcatcgtgcccaccatgcactaccaggacagc

SEQ ID NO: 10984 - DNA, 201 bp, Artificial Sequence
  Synthetic polynucleotide
gagaagaatggaaataaccgaaagctgcgggtttgtgttgctacttgtaaccgtgcagattattctaaacttgccccgatcatgtttggcattaaaaccgaacctgagttctttgaacttgatgttgtggtacttggctctcacctgatagatgactatgggtaagatgaaagcattttcttattcttcattgcaacagtg

SEQ ID NO: 10985 - DNA, 201 bp, Artificial Sequence
  Synthetic polynucleotide
atgcttatggacaaaaatgctacagctttgaggctaaatcatatgtcaaataaaactacttcatcaaaaaacatggaaatggtccaacagaaaaaagagggccccattccaccagatgcacaaaatccagatatgtcgttctttaagatgctattcttgccagaatcagcaaggtggatacaaaggactcatggaaagaac

SEQ ID NO: 10986 - DNA, 201 bp, Artificial Sequence; identical to SEQ ID NO: 10714
  Synthetic polynucleotide

SEQ ID NO: 10987 - DNA, 201 bp, Artificial Sequence
  Synthetic polynucleotide
ggtttcgagtcaggggaggtcacaccggaccagatcacctgctctaacccggagcagtatgtgggctggtattcttcgtggactgcaaacaaggcccggctcaacagtcaaggctttgggtaagcagggcccggggattttttttcatgtgcttttaaaaaaaaataggcctctctaccagcgtggccaacacagtgaaac

SEQ ID NO: 10988 - DNA, 201 bp, Artificial Sequence
  Synthetic polynucleotide
tccatcctccccttccctctgactcttctcttttcccagcctacctctcctctcccctggccctgcccagccagaggaggagcccccccgaggagccacctgacttctgctgtcccaagtgccagtatcaggcccctgatatggacaccctgcagatacatgtcatggagtgcattgagtagggccggccagtgcaaggcc

SEQ ID NO: 10989 - DNA, 201 bp, Artificial Sequence
  Synthetic polynucleotide
agagtgcagccgccgcccacccgacgccaggcctcgctccccgcctggcctgtccgcttcagtgttccatccgcgtctgtctccccgcaggccccggacggtgacggtgaaggtggaactgagctgcgcacccggggatctcgatgccgtcctcatcctgcagggtcccccctacgtgtcctggctcatcgacgccaacca

SEQ ID NO: 10990 - DNA, 201 bp, Artificial Sequence
  Synthetic polynucleotide
acagggtgggccatcatgagacataatgatctcatccccccctaagagctggctgtacctgaaaggatcatacatgcgctgtgaccgcaagatggaggtggcgttcatggtgtgtgccatcaacccttccattgacctgcacaccgactcgctggagcttctgcagctgcagcaggtgagggctgagccaatggggcagga

SEQ ID NO: 10991 - DNA, 201 bp, Artificial Sequence; identical to SEQ ID NO: 10791
  Synthetic polynucleotide

SEQ ID NO: 10992 - DNA, 201 bp, Artificial Sequence; identical to SEQ ID NO: 10809
  Synthetic polynucleotide

SEQ ID NO: 10993 - DNA, 201 bp, Artificial Sequence
  Synthetic polynucleotide
caggatctggcaagtctgaaaatccctgagcaatttcgacatgcgatctggaagggcatcctggaccaccggcagctccacgaattctcctccccttctcatctcctgcggaccccaagcagtgcctctacagtcagtgtgggctccagtgagacccggggtgagcgtgttattgatgctgtgcgattcaccctccgccag

SEQ ID NO: 10994 - DNA, 201 bp, Artificial Sequence; identical to SEQ ID NO: 10832
  Synthetic polynucleotide

SEQ ID NO: 10995 - DNA, 201 bp, Artificial Sequence
  Synthetic polynucleotide
gtgagtcagtgtgcagcatttgaaaaccccaagggactaattcatggttgttccaaagataatagaaatgacacagaaggctttaagtatccattgggacatgaagttaaccacagtcgggaaacaagcatagaaatggaagaaagtgaacttgatgctcagtatttgcagaatacattcaaggtttcaaagcgccagtca

SEQ ID NO: 10996 - DNA, 201 bp, Artificial Sequence
  Synthetic polynucleotide
tctctctgcctattggtctattttcccacccttaggctgctggtggtctacccttggacccagaggttctttgagtcctttggggatctgtccactcctgatgctgttatgggcaaccctaaggtgaaggctcatggcaagaaagtgctcggtgcctttagtgatggcctggctcacctggacaacctcaagggcaccttt

SEQ ID NO: 10997 - DNA, 209 bp, Artificial Sequence
  Synthetic polynucleotide
tctctttgtcctgactgctcaaatcccatgttttcaggatttatcagtcttgtactaaggcatggaacttttagccattctgcagttttcatgggtatgtcctcatgcaccaaaatgattggttccacagaatcttcaagtaagtcattaaggtcatcaactttaatgtcacaataacagcattcgtgaattggcttcatgataagttt

SEQ ID NO: 10998 - DNA, 201 bp, Artificial Sequence
  Synthetic polynucleotide
tcgctgctatacactgacctgtctcataaaaagggggactctatagtctattgacgttttcttttccatgtgcagaaggaggcaatgtatatgcaactggtggaaataatgaaggacagttggggcttggtgacaccgaagaaagaaacacttttcatgtaattagcttttttacatccgagcataagattaagcagctgt

SEQ ID NO: 10999 - DNA, 201 bp, Artificial Sequence
  Synthetic polynucleotide
acgagtttcgctgccacgatgggaagtgcatctctcggcagttcgtctgtgactcagaccgggactgcttggacggctcagacgaggcctcctgcccggtgctcacctgtggtcccgccagcttccagtgcaacagctccacctgcatcccccagctgtgggcctgcgacaacgaccccgactgcgaagatggctcggatg

SEQ ID NO: 11000 - DNA, 201 bp, Artificial Sequence
  Synthetic polynucleotide
gaagctccttgtcaagatgccttttcaaacttcgccagggggcaaggctgaggggggtggggccaccacatccacccaggtcatggtgatcaaacgccccggcaggaagcgaaaagctgaggccgaccctcaggccattcccaagaaacggggccgaaagccggggagtgtggtggcagccgctgccgccgaggccaaaaa

SEQ ID NO: 11001 - DNA, 201 bp, Artificial Sequence; identical to SEQ ID NO: 10854
  Synthetic polynucleotide

SEQ ID NO: 11002 - DNA, 201 bp, Artificial Sequence
  Synthetic polynucleotide
cagggccatgatgcctgttcctccccacacccctcgccctcctggctggcgccgccagattgaccaagtctccctcccgtcctcccccagaaaaaggtgcactgcctcaacatggacagcctctctttccagctgggcctctacctcagcccacacttcctccaggcctccaacaccatcgagccggggcagcagagcttt

SEQ ID NO: 11003 - DNA, 201 bp, Artificial Sequence
  Synthetic polynucleotide
ggtgcccattgtgtccttggagtgtgtgtcctgcaaggcacaggccgtgtacgaagtgagccgcagctcctacgtgtacttggagggccgctgcctcaattgcagcagcggctccaagcgaggggtgagtgttgagcggggtgtgggcgggctggggatgggtcccatggccgaggggacggggcctgcaggcagaagtgg

SEQ ID NO: 11004 - DNA, 201 bp, Artificial Sequence
  Synthetic polynucleotide
gctcaatggaaatctgcgtgataaaggtggagatcaaggacctgaacgacaatgcgcccagtttcccggcagcacagatcgagctggagatctcggaggcagccagccctggcacgcgcatcccgctggacagcgcttacgatccagactcaggaagctttggcgtgcagacttacgagctcacgcccaacgagctgttcg

SEQ ID NO: 11005 - DNA, 201 bp, Artificial Sequence
  Synthetic polynucleotide
tccctgagtgcctgcaggctgacatctgcctgcacctgaaccgctcactgctgcagcactgcaaacccttccgaggggccaccaagggctgccttcgggccctggccatgaagttcaagaccacacatgcaccgccaggggacacactggtgcatgctggggacctgctcaccgccctgtacttcatctcccggggctcca

SEQ ID NO: 11006 - DNA, 201 bp, Artificial Sequence; identical to SEQ ID NO: 10798
  Synthetic polynucleotide

SEQ ID NO: 11007 - DNA, 201 bp, Artificial Sequence
  Synthetic polynucleotide
gaggcctgtcctgcactgtgtgcatcccctagatttggagatggctatatcgtcacaatgaagatcaaatccccgaaggacgacctgcttcctgacctgaaccctgtggagcagttcttccaggggaacttcccaggcagtgtgcagagggagaggcactacaacatgctccagttccaggtctcctcctcctccctggcg

SEQ ID NO: 11008 - DNA, 201 bp, Artificial Sequence
  Synthetic polynucleotide
tagagtgagaggcgggctgacttctggtcatggccgtggcgcgtgagcccatcttctctttcctcagtgcctttgtggtggagcggcagccctgcatgcccatgcatcctgaccggcccctcgtcatcaagaccggcgtccagttcactactaaagtcaggtaggccatgccacttccatttccagtagagattttactga

SEQ ID NO: 11009 - DNA, 201 bp, Artificial Sequence
  Synthetic polynucleotide
tgtgaactttaaaaaatttcaggcctcccgaggagcccagacagctgcagccacagctccccgtatcaagaaatttgccatctatcgatgggacccagacaaggctggagacaaacctcatatgcagacttatgaagttgaccttaataagtgagtatctctgtgaaagccagctattgaaggagagttcttgatttgatt

SEQ ID NO: 11010 - DNA, 201 bp, Artificial Sequence
  Synthetic polynucleotide
tttaagtgaggatgtgtgaggcatcccacctcctacaccacaccaacagcatgacctctctctctgtttcaggactcatatccaggctcaaatatccagtgtctcaacaaaacaagaatgcaccttccactgcaggcctgggatacggtaactccttatttctctggggtagggtggactggccagttgcaaaaactacct

SEQ ID NO: 11011 - DNA, 203 bp, Artificial Sequence
  Synthetic polynucleotide
cgtcatttgctgtggattattaaggtctaccaggtccagaaggtcctccaggtctccctggaaatggaggtattaaaggagagaagggaaatccaggccaacctgggctacctggcttgcctggtttgaaaggagatcaaggaccaccaggactccaggtaggaaatggaagtagatatctgatgagagaagaatgtgggtgt

SEQ ID NO: 11012 - DNA, 201 bp, Artificial Sequence
  Synthetic polynucleotide
taaattctggattccttttaggccaccaccacctatcatgacagatggtgaagatgcggattacactcattttacaaaccagcagagttccacacggcatttctcaaaatcagagtcctctcataaaggtaagaagagtatgtatggtcaagtttaggatcttctttttttatataagcctcgtgttgtagtggaaaaatc

SEQ ID NO: 11013 - DNA, 201 bp, Artificial Sequence
  Synthetic polynucleotide
gcaggtgagcacctggggtgttgcctgtaccaggtgaaccccccagacctgatgagctgcctgactagccgcaccctcatcacccgcggggagacggtgtccaccccactgagcagggaacaggcactggacgtgcgcgacgccttcgtaaaggtgggctggagggaaggggccgcttgctcgccctaccccttgggaagt

SEQ ID NO: 11014 - DNA, 201 bp, Artificial Sequence; identical to SEQ ID NO: 10927
  Synthetic polynucleotide

SEQ ID NO: 11015 - DNA, 201 bp, Artificial Sequence
  Synthetic polynucleotide
tcatcttactagcctcaaacatatcttctttgccaggactcgcctctgcacaaagccctcttttgggtagctgtggctgtgctgcagcttgatgaggtcaacttgtattcagcaggtaccgcacttcttgaacaaaacctgcatactttagatagtctccgtatattcaatgacaaggtaagcaaactttgccttgaggtt

SEQ ID NO: 11016 - DNA, 201 bp, Artificial Sequence
  Synthetic polynucleotide
ggttggcagtttctgatgtttttcttcatcttggatattgtaggtgccactcccgggagagccaggcagccatggcgggtcaggaggagacgtctcaggatgagacctatgaagtgaagatgaaccatgacacggaggcctgcagtgagcccagcctgctctccacagagatgtgagctctgctgccctctgctgaggctg

SEQ ID NO: 11017 - DNA, 201 bp, Artificial Sequence
  Synthetic polynucleotide
gcgccggacgccacttccggtccccgtggtcacgtgaccgtcacttcacgtgaccgcgcggcggccgctgcggcgcgatggcggcggggctggcgcggctcctgttgctcctcgggctctcggccggcggtgagtggcccggccgtccgcgtccccaggccccgcgcgcgctctgcaccccggcctccccgctcacggtct

SEQ ID NO: 11018 - DNA, 201 bp, Artificial Sequence; identical to SEQ ID NO: 10838
  Synthetic polynucleotide

SEQ ID NO: 11019 - DNA, 201 bp, Artificial Sequence
  Synthetic polynucleotide
ggccgggcctacggcttggggcggccgggcccggcggcgggctgtgtccgcggggagcgtccaggctgggccgcaggaccgggcgcggagcctcgcagggtcgggctcgggctccctaaccgtctccgcttcttccgccagtcggtggccgggctggcggcgcggttgcagcggcagttcgtggtgcgggcctggggctgc

SEQ ID NO: 11020 - DNA, 201 bp, Artificial Sequence
  Synthetic polynucleotide
tatgtcttccacccttgactctcaggatagtgcagcaggatgcagcggaacccccccgatttgccgacaagcccagaccaaactagaagtggccctgtacatgtttctgtggaaccctgacactgaagctgttctggttgccatgtcctgtttccgccacctctgtgaggaagcagatatccggtgtggggtggatgaagt

SEQ ID NO: 11021 - DNA, 201 bp, Artificial Sequence
  Synthetic polynucleotide
gcttattgggtaattctttgggattctctattggagtaggtactacgagactggcagcatccggcctggagtgatagggggctccaagcccaaggtggccacccccaaggtggtggagaagattggggactacaaacgccagaaccctaccatgtttgcctgggagatccgagaccggctcctggctgagggcgtctgtga

SEQ ID NO: 11022 - DNA, 201 bp, Artificial Sequence
  Synthetic polynucleotide
cttgtatgggtgaccagcccaacctgccctatgtcctggccttcctttatgaagccatgcgcttctccagctttgtgcctgtcactattcctcatgccaccactgccaacacctctgtcttgggctaccacattcccaaggacactgtggtttttgtcaaccagtggtctgtgaatcatgacccagtgaagtggcctaacc

SEQ ID NO: 11023 - DNA, 201 bp, Artificial Sequence
  Synthetic polynucleotide
ggcatttctgccaccctccctctgctttacaatcaggctctcctccttcagatgagatccgcaccctccgagaccagttgcttttactgcacaaccagttactctatgagcgttttaagaggcagcagcatgccctccggaacaggcggctcctccgcaaggtgatcaaagcagcagctctggaggaacataatgctgcca

SEQ ID NO: 11024 - DNA, 201 bp, Artificial Sequence; identical to SEQ ID NO: 10793
  Synthetic polynucleotide

SEQ ID NO: 11025 - DNA, 201 bp, Artificial Sequence
  Synthetic polynucleotide
atggccattttatcctctgactttctgactttggatttgtctctctttccaggtagatgaagagtacaagaatcctcacacagtagaccgagttcctatggggaaggtgcctcatctgtggggccaatccttgtacatcctcagctcgctgttggcagaggtaggggcttagtggcctcacagactggaaaccatgtgatt

SEQ ID NO: 11026 - DNA, 201 bp, Artificial Sequence
  Synthetic polynucleotide
ctgcagcttgtccctggccagggggcacccggcaggcctggtgagggcctccagcccccattgccacccctcactgtctgggtgtgctcactctgccagggcctgcggtccaatgtcctcttgtcttttgatgacacccccgagaaggacagcttcagggcccggagtactagtctcaacgagagacccaagaggtacggc

SEQ ID NO: 11027 - DNA, 201 bp, Artificial Sequence
  Synthetic polynucleotide
gcccaagtgactgacatcaactccaagggattggaattgaggaagactgttactacagttgagactcagaacttggaaggcctgcatcatgatggccaattctgccataagccctgtcctccaggtatgttacacaaaacatccagagattacagtgaaagtcacagttaggagtagcacatagtaatcatgactataata

SEQ ID NO: 11028 - DNA, 204 bp, Artificial Sequence
  Synthetic polynucleotide
ggcagaggaaggcaggagcagaggctaagccgctcatccccagggcaggtgtagacgcagtgctcccccggcccaggcttcctgaactactacgatgcctgctcggagggtctgcgcgccgccagccccgccctgcggctgggaggccccggcgactccttccacaccccaccgcgatccccgctgagctggggcctcctgcgc

SEQ ID NO: 11029 - DNA, 201 bp, Artificial Sequence
  Synthetic polynucleotide
tgggtgccactggggcgaaggcctggccatctcctgaccctcctctcccacctgcagacgtacaacaccaatgcccaggtccctgacagtgccggcaccgccaccgcctacctgtgtggggtgaaggccaatgagggcaccgtgggggtaagcgcagccactgagcgttcccggtgcaacaccacccaggggaacgaggtc

SEQ ID NO: 11030 - DNA, 201 bp, Artificial Sequence
  Synthetic polynucleotide
cgcggcggccaaagctggcatgaaccgggtattcctgcagcggctcctgtggctcctgcggctgctgttcccccgggtcctgtgccgggagacggggctgctggccctgcactcggccgccttggtgagccgcaccttcctgtcggtgtatgtggcccgcctggacggaaggctggcccgctgcatcgtccgcaaggaccc

SEQ ID NO: 11031 - DNA, 201 bp, Artificial Sequence
  Synthetic polynucleotide
aaggggtgtgggccttttgggcagagcaggaagatctgcctatgacttctgcttaccacttcccaggcctcctgtgtcacctggatgacgcctgtgtcagcaacccctgccacgaggatgctatctgtgacacaaatccggtgaacggccgggccatttgcacctgtcctcccggcttcacgggtggggcatgtgaccagg

SEQ ID NO: 11032 - DNA, 201 bp, Artificial Sequence; identical to SEQ ID NO: 11004
  Synthetic polynucleotide

SEQ ID NO: 11033 - DNA, 201 bp, Artificial Sequence
  Synthetic polynucleotide
tgcttcaaagcttctctcgtcagaagcctggggctcactcatcccgtcaagcctacggggcctccctgtacgagcagctggtgtgggaacgtcagttaggacttcccctctacctgtgggctaccaaggccctggaggagctggcctgcaagtgaggaggctgagggcccagggcggggaggcagtgggagtagcacactt

SEQ ID NO: 11034 - DNA, 201 bp, Artificial Sequence
  Synthetic polynucleotide
ccctgcccaggagcagagacccagcggggagttaccatctgaacctctccagccacttccgctggtcggcgctgcaggtgtccgtgggcctgtacacgtccctgtgccagtacttcagcgaggaggacatggtgtggcggacagaggggctgctgcccctggaggagacctcgccccgccaggccgtctgcctcacccgcc

SEQ ID NO: 11035 - DNA, 201 bp, Artificial Sequence
  Synthetic polynucleotide
aatgctgaccaaagacctcatgattcccacagttttcaggcaaagggaatatggaaaaagccagaagaaatgcccacagcctgcccaggccacagtccacgtagtcaaatggctctcactggaatctctcctcccttggcacaaagtcctccagaggtccctaaacaacagctcttgagttatgagttaggtcaaggtcat

SEQ ID NO: 11036 - DNA, 212 bp, Artificial Sequence
  Synthetic polynucleotide
agggcctgcaggcacgtggcactcagaagacgtttatttattctttcagaggctgaggctgcagtggccacccaggagacatccaccgtcaggctaaaggtcagctccacagccgtaaggacacagcacacaaccacccgacctgttcccgacacctcccggctgcctggggccacccctgggctcaccacggtggagatagtgacaatgtc

SEQ ID NO: 11037 - DNA, 212 bp, Artificial Sequence
  Synthetic polynucleotide
ctgggtgggggcgggtggcagggcctcttcctcactcatttcattgtcatctgcattcccccagggcttcagtttccacctggctgcggtcctgctgtccctggcttttatcacttacgtggagcatggtgagtgcagggcccagcccagccgttggatagaaggttggtgggggggctggagacagcctcccctgaggctaacctgacccc

SEQ ID NO: 11038 - DNA, 201 bp, Artificial Sequence
  Synthetic polynucleotide
gtgacagctttctctgccccctgccaggtgaatgtgatgccctctgccagccgggtgatcctcctggagaacctgacccgcttctggcccatcatccagatccgcataaagcgctgccagcaggtggggccagggatgtggggtgtggccctgggtagggggctctgagccccataaacaggcagatcttaagccagagga

SEQ ID NO: 11039 - DNA, 201 bp, Artificial Sequence
  Synthetic polynucleotide
gcaaaactccatctcaaaaaaaagcgggaggggaaataatttgctgtttcttccttcccttcctcagaatgactgatggatactcaggaagtgacctaacagctttggcaaaagatgcagcactgggtcctatccgaggtaggtatacaagagcttaaaacatttagaactatttattataccaccttagaagtttaagaa

SEQ ID NO: 11040 - DNA, 201 bp, Artificial Sequence
  Synthetic polynucleotide
atctgggctgcgcgcttgcgcttcgcttcctggccctcgtttcctgggacatccctggggctagagcactggacaatggattggcaaggacgcctaccatgggctggctgcactgggagcgcttcatgtgcaaccttgactgccaggaagagccagattcctgcatcaggtatcagatattgggtactcccttccctttgc

SEQ ID NO: 11041 - DNA, 201 bp, Artificial Sequence
  Synthetic polynucleotide
gactcagaccgggactgcttggacggctcagacgaggcctcctgcccggtgctcacctgtggtcccgccagcttccagtgcaacagctccacctgcatcccccagctgtgggcctgcgacaacgaccccgactgcgaagatggctcggatgagtggccgcagcgctgtaggggtctttacgtgttccaaggggacagtagc

SEQ ID NO: 11042 - DNA, 201 bp, Artificial Sequence
  Synthetic polynucleotide
ccacgcggtgggggaggcggctagcgtggtggacccgggccgcgtggccctgtggcagccgagccatggtttctaaactgagccagctgcagacggagctcctggcggccctgctcgagtcagggctgagcaaagaggcactgatccaggcactgggtgagccggggccctacctcctggctggagaaggccccctggaca

SEQ ID NO: 11043 - DNA, 201 bp, Artificial Sequence
  Synthetic polynucleotide
gatgccccggtgagccccaccactctgtatgtggaggacatctcggaaccgccgttgcacgatttctactgcagcaggctactggacctggtcttcctgctggatggctcctccaggctgtccgaggctgagtttgaagtgctgaaggcctttgtggtggacatgatggagcggctgcgcatctcccagaagtgggtccgc

SEQ ID NO: 11044 - DNA, 201 bp, Artificial Sequence
  Synthetic polynucleotide
ctcaggtggagatgcggaaagccctgacggacttcattcaagaggaattccagcatctgaagactcaggcagagcagctccacaaccacctccagcctgggagataggccttgcttgctgccttctggattcttggcccgcacagagctggggctgagggatggactgatgcttttagctcaaacgtggcttttagacaga

SEQ ID NO: 11045 - DNA, 201 bp, Artificial Sequence
  Synthetic polynucleotide
gtagttgactaaacagcgtctggtggatgcagatggcatcattaatcccagcgctttctacatctacctgacggcttgggtcagcaacgaccccgtcgcgtatgctgcctcccaggccaacatccggccacaccgaccagaatgggtccacgacaaagccgactacatgcctgaaacaaggctgagaagtaagtagcgttt

SEQ ID NO: 11046 - DNA, 201 bp, Artificial Sequence
  Synthetic polynucleotide
cttctagcagcgaggggagggcagatgtcccaggggctggtcactggagcattcctcccctctgactccccagtacaacgccctgctaagcaacatgagcaggatctactccaccgccaaggtctgcctccccaacaagactgccacctgctggtccctggacccaggtacggcccttgcagctcccctctcggcggtgcc

SEQ ID NO: 11047 - DNA, 201 bp, Artificial Sequence
  Synthetic polynucleotide
aggagtgcccccgggagggcaagtctttcaaggcgaagtacaaactggtcaaccacatccgagtgcacacgggcgagaagcccttcccatgccccttcccgggctgcgggaagatctttgcccgttctgagaacctcaagatccacaagaggacccacacaggtaagggaaaaaagcaggcgggcgtgggttccactggcg

SEQ ID NO: 11048 - DNA, 204 bp, Artificial Sequence
  Synthetic polynucleotide
ctcccgaggcggggactccaggggaccgcggccccagcacccaagtgcttcctttgcccccgcctgccctgcagccccaggagccgtacagcttcagcgagccggcccagcaggccatgaggaaggccctcaccctgcgctacgcactcctcccccacctctacacactgttccaccaggcccacgtcgcgggggagaccgtgg

SEQ ID NO: 11049 - DNA, 201 bp, Artificial Sequence; identical to SEQ ID NO: 10789
  Synthetic polynucleotide

SEQ ID NO: 11050 - DNA, 201 bp, Artificial Sequence; identical to SEQ ID NO: 10812
  Synthetic polynucleotide

SEQ ID NO: 11051 - DNA, 201 bp, Artificial Sequence
  Synthetic polynucleotide
cccttgcagatccagaagcatcgcaagcggttgaaggcggaggagcagtggcagcgacggcagcaggtgttccgccggggcgtgtcaacgcggcgctcggcctacgccttctcgcaccagcggggctacgcggacctcatctcctccgggcgcagcatccgcaagaagcgctcgccgcttgatgccatcgtggcggatggc

SEQ ID NO: 11052 - DNA, 210 bp, Artificial Sequence
  Synthetic polynucleotide
tgccggacgccgcgaacctgagcagcgcctggcgcaaccacactgtcccactgcggctgcgggacggccgcgaggtgccccacagctgccgccgctaccggctcgccaccatcgccaacttctcggcgcttgggctggagccggggcgcgacgtggacctggggcagctggagcaggagagctgtctggatggctgggagttcagtcagg

SEQ ID NO: 11053 - DNA, 201 bp, Artificial Sequence; identical to SEQ ID NO: 10977
  Synthetic polynucleotide

SEQ ID NO: 11054 - DNA, 201 bp, Artificial Sequence
  Synthetic polynucleotide
cgcccaggatactgttacacagctctgacaaacgggcgctgctctaaccagctgccacagtccataaccaaaatgcagtgctgctgtgatgccggccgatgctggtctccaggggtcactgtcgcccctgagatgtgtcccatcagagcaaccggtaagagcccttccagttatctgcagaatatcccatcccagccctca

SEQ ID NO: 11055 - DNA, 201 bp, Artificial Sequence; identical to SEQ ID NO: 10935
  Synthetic polynucleotide

SEQ ID NO: 11056 - DNA, 201 bp, Artificial Sequence
  Synthetic polynucleotide
cagccgccgcccacccgacgccaggcctcgctccccgcctggcctgtccgcttcagtgttccatccgcgtctgtctccccgcaggccccggacggtgacggtgaaggtggaactgagctgcgcacccggggatctcgatgccgtcctcatcctgcagggtcccccctacgtgtcctggctcatcgacgccaaccacaacat

SEQ ID NO: 11057 - DNA, 201 bp, Artificial Sequence
  Synthetic polynucleotide
ttcttttagaaaaacaatgtggtgagtgtcaacaaggagcctgttgccgagcctgacatcatggccacaaatggcgtggtccatgtcatcaccaatgttctgcagcctccaggtaagtgtcgcatccccactgactctgcagccagtccttttcttcatgtggcagttggtggagagaagaaaaactgttctaaacaatga

SEQ ID NO: 11058 - DNA, 201 bp, Artificial Sequence
  Synthetic polynucleotide
ttttggcccgcttctctctctctctgtctctcggctacagacctgccacctggaactccagatgcttttgcccaactgctgacctgcccctactgcgaccggggctacaagcgcttgacatcactgaaggagcacatcaagtaccgccacgagaagaatgaagagaacttttcctgccctctctgtagctacacgtttgcc

SEQ ID NO: 11059 - DNA, 201 bp, Artificial Sequence; identical to SEQ ID NO: 10924
  Synthetic polynucleotide

SEQ ID NO: 11060 - DNA, 201 bp, Artificial Sequence
  Synthetic polynucleotide
agatggctttcctgctgcagcaaccagtgctaacttatgtttggcaactggtgtacggggcggtgtggactggatgagaaagttggccttccgctacagacgggtaaaagagatctacaacacctacaaaaataatgttggaggcaagtgattaccaccagtacctcagcaagttaagacagtccagatacaattccaaaa

SEQ ID NO: 11061 - DNA, 201 bp, Artificial Sequence
  Synthetic polynucleotide
aaaggttctgaaggataccttgcagccacctatccaactgtcggccagaccagtccccgagccaggaaatccatgagcctggacatggggcaaccttctcaggccaacactaagaagttgcttggttagtttatctaaattatgtagattttttttattatttaaaaaaatagatatttttactcttggaaaattatttga

SEQ ID NO: 11062 - DNA, 213 bp, Artificial Sequence; identical to SEQ ID NO: 10916
  Synthetic polynucleotide

SEQ ID NO: 11063 - DNA, 201 bp, Artificial Sequence
  Synthetic polynucleotide
ttcctatgctgaagtatttttttagagccatcttttatctttacttagaacaatgatgttgtggtttgttttattcagatcaagttttcagaagccgactactttggcaacgtcctacaaactcgcaagtatttagcacagtctgatttcttctggctaagaaaagccgttccaaaaacagagtgagtattaaacaaaaaa

SEQ ID NO: 11064 - DNA, 201 bp, Artificial Sequence; identical to SEQ ID NO: 10876
  Synthetic polynucleotide

SEQ ID NO: 11065 - DNA, 201 bp, Artificial Sequence
  Synthetic polynucleotide
agtgccatccgttacctggagggccaactggccctgtcgttccgcagccgtctggtggcccacgcctaccgcctctacttctcccagcagacctactaccgggtcagcaacatggacgggcggcttcgcaaccctgaccagtctctgacggaggacgtggtggcctttgcggcctctgtggcccacctctactccaacctg

SEQ ID NO: 11066 - DNA, 201 bp, Artificial Sequence
  Synthetic polynucleotide
aaaacgcggatgattctaaaacaggatttaggagaccaatgtttatttttcttttagctttgattgctaacccaaggaggaagctggtttgggccataagtgtcaccatgataggtgtcgttctctttgattttgctgccgacttcattgatgggcccatcaaagcctacttatttgatgtctgctcccatcaggacaagg

SEQ ID NO: 11067 - DNA, 201 bp, Artificial Sequence
  Synthetic polynucleotide
ccctttccccatgttaaagcacagaggaccctctttcattacctcccccttccacaggcaccaaattggacagctccggtgtggcctttgctgtggttggggcctgccaggccctgggtctccgggatgtccacctcgccctgtctgaggatcatgcctgggtagtgtttgggcccaatggggagcagacagctgaggtca

SEQ ID NO: 11068 - DNA, 201 bp, Artificial Sequence
  Synthetic polynucleotide
cagcagcggcggcggccgcggcagcggcggcggcggcagcggcagcggcggcagctggaggcctggctgcggctgggggccctggacaaggctgggctcccggccccggccccatcacctccatcccggattcgcttgggggtcccttcgccagcgtcctatcttcgctccaaagacccaacggtgccaaagccgccttag

SEQ ID NO: 11069 - DNA, 201 bp, Artificial Sequence
  Synthetic polynucleotide
cattacttccagctgctttttgaagtgtccaccaaaatgaacgactttttcctttcttcacgcagatttcctcctagagtgccaaaatcttttccattcaacacctcagtcgtgtacaaaaagactctgtttgtagaattcacggatcaccttttcaacatcgctaagccaaggccaccctggatgggtaatgaaaacaat

SEQ ID NO: 11070 - DNA, 201 bp, Artificial Sequence
  Synthetic polynucleotide
tgttttcaggccaaccatttaaactggatcccaaatctgctcatcgaaaactgaaggtgtcccatgataacttgacagtagaacgtgatgagtcatcatccaagaagagtcacacacctgaacgcttcaccagccaggggagctatggagtagctggaaatgtgtttattgatagtggccggcattattgggaagtggtca

SEQ ID NO: 11071 - DNA, 203 bp, Artificial Sequence
  Synthetic polynucleotide
tcgtgttttcagggtgagcctggtctgcctggatacccagggaaccctggtatcaaaggttctgtgggagatcctggtttgcccggattaccaggaacccctggagcaaaaggacaaccaggccttcctggattcccaggtaaaatttcttctcttaaatgcttccttctttccttccttatctactccaaccagtatcacag

SEQ ID NO: 11072 - DNA, 201 bp, Artificial Sequence
  Synthetic polynucleotide
atgggccagaacggcaacctctactttgccaatgtgctcacctccgacaaccactcagactacatctgccacgcccacttcccaggcaccaggaccatcattcagaaggaacccattgacctccgggtcaaggccagtgagtctcagaggctctgcactctctccctgactcctttcaccctcaggcatggcccttcccac

SEQ ID NO: 11073 - DNA, 205 bp, Artificial Sequence
  Synthetic polynucleotide
aggggaggaccccggctgccctgaccctcctgcccctggcttcccacagccacgccgtggcactgacccgagactctgagcggctgctggaggtgcggaagcggatcaatgtcctgcccctggggaggtgggtgaggctccagtgccccgagggcctggtgggggtggctgctgcatagccttagggattgacagagctgggaag

SEQ ID NO: 11074 - DNA, 201 bp, Artificial Sequence
  Synthetic polynucleotide
caatatccttttgaagaccataacccaccacagctagaacttatcaaacccttttgtgaagatcttgaccaatggctaagtgaagatgacaatcatgttgcagcaattcactgtaaagctggaaagggacgaactggtgtaatgatatgtgcatatttattacatcggggcaaatttttaaaggcacaagaggccctagat

SEQ ID NO: 11075 - DNA, 206 bp, Artificial Sequence
  Synthetic polynucleotide
cccgggtgcaccttcatcaacaagcccacgcggcctggctgtgagatgtgctgccgggcgcgccccgaggcctaccaggtccccgcctcataccagcccgacgaggaggagcgagcgcgcctggcgggcgaggaggaggcgctgcgtcagtaccagcaggtgggcgggaaagtccctggacagacacctgcagaccgcacggggga

SEQ ID NO: 11076 - DNA, 201 bp, Artificial Sequence
  Synthetic polynucleotide
aggagacagaacatacagagcaaaagcgaaatgtgattcgaattattcctcaccacaactacaatgcagctattaataagtacaaccatgacattgcccttctggaactggacgaacccttagtgctaaacagctacgttacacctatttgcattgctgacaaggaatacacgaacatcttcctcaaatttggatctggct

SEQ ID NO: 11077 - DNA, 207 bp, Artificial Sequence
  Synthetic polynucleotide
gactgcaacaccaacagtactctctagttcccactcacatagggggaagcccagcattttctaccagcagggcttgccagacagtcatctaactgaagaggctttgaaagtttcagctgctcctggactagctgaccagacaactggcatgtcaactctaacctctacttcctactcacatagagagaagcctggtactttttacca

SEQ ID NO: 11078 - DNA, 201 bp, Artificial Sequence
  Synthetic polynucleotide
ggtgcctgccaggggggaggctcctaaggcccaccccggtgttttccccgccagctgccttctgccagagcctgggcgccgccgcccccgaggtccgctgctgtgtggatgccgtgaacttcgtggccgagagcacgagagatcaggaggccaccggcgaggtgggacaggagccagaggcgggtggagcgaggcagaggc

SEQ ID NO: 11079 - DNA, 204 bp, Artificial Sequence
  Synthetic polynucleotide
gaagactcctgtacgagaagcagcagggccgggggcatcgtgaatcaggctccgggatgtgtgtgggatagagagttgggaagtgctctggacgtagtcgccatggaggtaactggaatgatacgcgccgtggtggtcttggtgctgatggtagtctcggtgccggtgggtctggtggtagtggtgctgtgtgtggtggggatg

SEQ ID NO: 11080 - DNA, 201 bp, Artificial Sequence
  Synthetic polynucleotide
aacgaggtgtggacatggccaggcttggtcccgagtggagccaacccatgaagaggctgacacttggcaacaccacctcctccgtgatcctcaccaactacatggacgtgagtgcttggctcagcccctcgctccctccctgtctcctttccctcatggacctagggctttctttgctgcaagactcaccctttccaagct

SEQ ID NO: 11081 - DNA, 201 bp, Artificial Sequence
  Synthetic polynucleotide
gtacctgggaaaattatgcttactaatgtggttttaatttcatcatgtttcatataggattcacctttatttgatcttattaaacaatcaaaggaccgagaaggaccaactgatcaccttgaatctgcttgtcctcttaatcttcctctccagaataatcacactgcagcagatatgtaagcaaaatatatgttatgttga

SEQ ID NO: 11082 - DNA, 201 bp, Artificial Sequence
  Synthetic polynucleotide
tccatcacctggagcaatagacagtaataacagcctgtctgaaatgacacacttcaggccacagctccatcacagtggggacatggtatttacccctgagtcaggcctccaattaagattaaatgagaaactggggacaactgcagcaacagagttgaagaaacttgatttcaaagtttctagtacatcaaataatctgat

SEQ ID NO: 11083 - DNA, 201 bp, Artificial Sequence; identical to SEQ ID NO: 10850
  Synthetic polynucleotide

SEQ ID NO: 11084 - DNA, 214 bp, Artificial Sequence; identical to SEQ ID NO: 10715
  Synthetic polynucleotide

SEQ ID NO: 11085 - DNA, 201 bp, Artificial Sequence
  Synthetic polynucleotide
caaggccaaccgcgagaagatgacccagatcatgtttgagaccttcaacgtgcccgccatgtacgtggccatccaggccgtgctgtccctctacgcctccggcaggaccaccggtgagtgcccgctgcccccagtcccctctcccgcccccgcccccgcccccgcccccgccgctagcgctgagagcctagcctcggcctc

SEQ ID NO: 11086 - DNA, 201 bp, Artificial Sequence
  Synthetic polynucleotide
cctgtgtctatctggagcccagcttccatctccccactgtcagatcccttgtccacctcctcttcctgcatgcagaggtcctatcccatgacctatactcaggcttcaggttatagtcaaggatatgctggctcaacttcctactttgggggcatggactgtggatcatatttgacccctatgcatcaccagcttcccgga

SEQ ID NO: 11087 - DNA, 206 bp, Artificial Sequence
  Synthetic polynucleotide
ttacgtgttccaaggggacagtagcccctgctcggccttcgagttccactgcctaagtggcgagtgcatccactccagctggcgctgtgatggtggccccgactgcaaggacaaatctgacgaggaaaactgcggtatgggcggggccagggtgggggcggggcgtcctatcacctgtccctgggctcccccaggtgtgggacatg

SEQ ID NO: 11088 - DNA, 201 bp, Artificial Sequence; identical to SEQ ID NO: 11034
  Synthetic polynucleotide

SEQ ID NO: 11089 - DNA, 201 bp, Artificial Sequence
  Synthetic polynucleotide
aagacgctgttcccgctgcgctccatcgacgacgtggtgcgcctgtttgctgccgagctgggccgagaggagccggacctggtgctcctttccttggtgctgggcttcgtggagcattttctggctgtcaaccgcgtcatccctaccaacgttcccgagctcaccttccagcccagccccgcccccgacccgcctggcggc

SEQ ID NO: 11090 - DNA, 201 bp, Artificial Sequence
  Synthetic polynucleotide
ctttgagtttcacctggtgggacctcttgtccttcaggtcctggctgctgtctacaaggccctgaatgaccatcatgtttacctggagggcaccctgctaaagcccaacatggtgactgctggacatgcctgcaccaagaagtatactccagaacaagtagctatggccaccgtaacagctctccaccgtactgttcctgc

SEQ ID NO: 11091 - DNA, 201 bp, Artificial Sequence
  Synthetic polynucleotide
gcagtggaaactgcttcctgggaatactgatgatgtgccttcccttggactgtgctgcagcgcccatgccctgcagaccatgttccagttaatgactcccaagcaaatgtacgagcacttcaaggggtacgagtatgtctcacacatcaactggaacgaggacaaagcggcagccatcctggaggcctggcagaggacata

SEQ ID NO: 11092 - DNA, 203 bp, Artificial Sequence
  Synthetic polynucleotide
tgcacacacacacacgctttttacctgagtggttaaaatgtcactctgagaggatagccctgagcagtcttcagagacgcttgtttcactctcacacccagatgctgcttcaccttaaataacaaaaacagaggttcagatgtaaaagcagactataaacgctgcaacttgctgtgtctttttcttctcattggcaggactgg

SEQ ID NO: 11093 - DNA, 201 bp, Artificial Sequence
  Synthetic polynucleotide
acgtaccatctttcccccaggtggtcaagtaccccctgcacgccatcatggagatcaaggagtacctgattgacatggcctccagggcaggcatgcactggctgtccaccatcatccccacgcaccacatcaacgcgctcatcttcttcttcatcgtcagcaacctcaccatcgacttcttcgccttcttcatcccgctgg

SEQ ID NO: 11094 - DNA, 201 bp, Artificial Sequence
  Synthetic polynucleotide
ctggcatcgctcctcagtatacctcctgtcactgtcccttcaggactggagccgggcctcgtctttcttggcttcctcctggtggttgggatggggctggctggggccttcctggcccattatgtgaggtgagtagtggaatgaggtaagtaggaagtgagcttgtgccagaaatggaagtctgcagcaaaaacagcaggc

SEQ ID NO: 11095 - DNA, 201 bp, Artificial Sequence
  Synthetic polynucleotide
cacgccatcggaggagccaggcgggccccagatgctgacctcccaggctccgtgtgtagatggcttcgaggagccaggagcacggcagcgggccctcagcgcagtcagcgtcctcaccagcgcactggaaggtcagcaaccccaggtcatttaagcaccccccacttccgctgcaggtaccctcatctttatcccagcctg

SEQ ID NO: 11096 - DNA, 201 bp, Artificial Sequence
  Synthetic polynucleotide
actgacaagtccccttgtttgtgcccgcagaggatcagcactgccagtggagatgggcgtcactactgctaccctcatttcacctgcgctgtggacactgagaacatccgccgtgtgttcaacgactgccgtgacatcattcagcgcatgcaccttcgtcagtacgagctgctctaagaagggaacccccaaatttaatta

SEQ ID NO: 11097 - DNA, 201 bp, Artificial Sequence
  Synthetic polynucleotide
tggaaatgagattactcgaggaggctccacctcttatggaaccggatcagagacggaaagccccaggaaccctagcagtgctggaagctggaactctgggagctctggacctggaagtactggaaaccgaaaccctgggagctctgggactggagggactgcaacctggaaacctgggagctctggacctggaagtactgg

SEQ ID NO: 11098 - DNA, 201 bp, Artificial Sequence
  Synthetic polynucleotide
aggccagaccagaaccagcaagactgaaaccacctgttcattacaatggcccctcaaaagcagggtatgttgactttgaaaatggccagtgggccacagatgacatcccagatgacttgaatagtatccgcgcagcaccaggtgagtttcgagccatcatggagatgccctccttctacagtcatggcttgccacggtgtt

SEQ ID NO: 11099 - DNA, 201 bp, Artificial Sequence
  Synthetic polynucleotide
ggaggtgggtacggcccagtgggggggagagggacacgccctgggctctgcccagggtgcagccggactgactgagcccctgtgccgcccccagttccgccacaaagtccgctttgaagggatggagccgctgccctctcgctcctccaggggctccaaggtatccccggatgtgcccccacccagcgctggctccgatgc

SEQ ID NO: 11100 - DNA, 201 bp, Artificial Sequence
  Synthetic polynucleotide
cgctgggaggtgtatcgcaccgccagctgccagcggccggggcgcccagcgcgtgtggccctgcccggcgtggacgtgagccggcctcggctggtgctgccgcggctggcgctgcctgtggggcactactgctttgtgtttgtcgtgtcatttggggacacgccactgacacagagcatccaggccaatgtgacggtggcc

SEQ ID NO: 11101 - DNA, 212 bp, Artificial Sequence
  Synthetic polynucleotide
acgagcagtcgtccatggggtctgagccgttgctgctacgagtccgcggggtgtagaagtcggggctcccggtgtcgttttccgagcccaggagcttgccctgggactccaggctggagctccggtgcctaaagtgcagtgcgaggctgtgcagtcgggtggggctgatgtccaccgacctgccgggagacgacccgggttggtctgggggt

SEQ ID NO: 11102 - DNA, 201 bp, Artificial Sequence; identical to SEQ ID NO: 10714
  Synthetic polynucleotide

SEQ ID NO: 11103 - DNA, 201 bp, Artificial Sequence
  Synthetic polynucleotide
attttggttccagaccaacatgatcccgggctcccccggcagtacggagttagagggtggcttcagtcggcaacgcaagcgcaagttgtccttccgcaggcgcacggacaagggtgaggcgggggaggggaggaagggggagggcggggacaaggtgaggctgggagctggaaggcggggtgggccgtgtctgctttaccc

SEQ ID NO: 11104 - DNA, 210 bp, Artificial Sequence
  Synthetic polynucleotide
caggacctggaccagactccagggcgtgcccccccaccccacctgcactccctcacctgttgagctggcgctggagggcatccagcctgctctccacgtcgccccggggccgccgacccgggctggagagggggatgttgaggaggctgggggtgggggcggggcatcgagggagctcctggtactggcggccccgactgtccccccaga

SEQ ID NO: 11105 - DNA, 201 bp, Artificial Sequence; identical to SEQ ID NO: 11095
  Synthetic polynucleotide

SEQ ID NO: 11106 - DNA, 201 bp, Artificial Sequence
  Synthetic polynucleotide
cacgaccacgtgcctctcctctcccgcaggccgcgccaagaccttccgcctgaagctgcccgcgctgctggcgctgacggcccgggagtcgtcggtgcggtcgggcggcgcgggcggcgcgggcgccccgggggccgtggtggtggacgtggacctgacgcccgcggcacccagcagcgagtcgctggccctggacgaagt

SEQ ID NO: 11107 - DNA, 207 bp, Artificial Sequence
  Synthetic polynucleotide
cgactcggaacggcttccgcggccggggcagcgagggccgggggcggcgggcgggatgagtgcggtgtgcggtggagcggcgcggatgctgcggacgccgggacgccacggctacgccgccgagttctccccgtacctgccgggccgcctggcctgcgccaccgcgcagcactacggcatcgcgggtgaggcggcgccgcgcagctg

SEQ ID NO: 11108 - DNA, 203 bp, Artificial Sequence
  Synthetic polynucleotide
ctgcccctccctgcccagcccctctcacctttgggacttggggcactttctcccagctcagcggctggggccggggcttctccaggggctccagtggcctcagcaggggcaggggcaggggccagcatgggctctgccttctctggaggggatcagatgggagtcgtggtgcagccactaaccagagacccctccaccctctc

SEQ ID NO: 11109 - DNA, 201 bp, Artificial Sequence
  Synthetic polynucleotide
actgcagcaggctactggacctggtcttcctgctggatggctcctccaggctgtccgaggctgagtttgaagtgctgaaggcctttgtggtggacatgatggagcggctgcgcatctcccagaagtgggtccgcgtggccgtggtggagtaccacgacggctcccacgcctacatcgggctcaaggaccggaagcgaccgt

SEQ ID NO: 11110 - DNA, 207 bp, Artificial Sequence
  Synthetic polynucleotide
tgcaactgtttcttcaggcacagacagcacacattgtcctggaagatggaactaagatgaaaggttactcctttggccatccatcctctgttgctggtgaagtggtttttaatactggcctgggagggtgagtaatgcttttccaaggctttatttttcctctagtagagaaataactggaagatctcactcatggtggtaagttga

SEQ ID NO: 11111 - DNA, 201 bp, Artificial Sequence
  Synthetic polynucleotide
tgggggcgccactgacgcctgcctggcccgccggacccttcgagaccccggtgctgcacagcctgcagagccgcgccggagccccgctcccggtgccccggggtcccagtgcaggtaagggtcgcgcctcaggttcggggtgcgggtccaaagcgctggggcgcacgggggacgtggagcagctgctccactcgggccctg

SEQ ID NO: 11112 - DNA, 201 bp, Artificial Sequence
  Synthetic polynucleotide
caccccttcgcgcagcgcacgctcaccgcgcgcttccaggtcaacaacacccgcccgccgcacgtgcagctgttgcgcaagccggtgctcacggccatggggctgctggcgctgctgggtgagccggggccgctggggtgggccggccagggccctccaggctggggagcggctcctgcgaaggccccgctgcggggagcg

SEQ ID NO: 11113 - DNA, 201 bp, Artificial Sequence
  Synthetic polynucleotide
acgtgtggtacccctgtctgctcaccatatgcttttgttttaggttctcccatggcgccagccagtgtgggcaattgcagtgtgggcaactgcagcccggaggcagtgtggcccaaaactgaacccctggagatggaagtaccccaggcacctatacagcccttctatagctctccagaactgtggatcagctctctccca

SEQ ID NO: 11114 - DNA, 201 bp, Artificial Sequence
  Synthetic polynucleotide
ggacactgctggctccacacaggggcccagcagggagctcgtatgccgctcgtgcctgaagcagacgctgcacaagctggaggccatgatgctcatcctgcaggcagagaccaccgcgggcaccgtgacgcccaccgccatcggagacagcatcctcaacatcacaggtgccgcggcccgtgccccatgccacccgcccgc

SEQ ID NO: 11115 - DNA, 201 bp, Artificial Sequence; identical to SEQ ID NO: 11099
  Synthetic polynucleotide

SEQ ID NO: 11116 - DNA, 201 bp, Artificial Sequence; identical to SEQ ID NO: 11100
  Synthetic polynucleotide

SEQ ID NO: 11117 - DNA, 201 bp, Artificial Sequence
  Synthetic polynucleotide
atttcacacgatcctttgatagtggcagtgtccgcctgcagatctcaaccccagacatcaaggataacatcgttgctcagctgaagcagctgtaccgcatccttcaaacccaggagagctggcagcccatgcagcccacccccagcatgcaactgccccctgccctgcctccccagtaattgtgaatgccatcttcttcct

SEQ ID NO: 11118 - DNA, 201 bp, Artificial Sequence
  Synthetic polynucleotide
aacgtgtgctacgatcactacttccccatctcccacatccggctatgggccctgcagctgatcttcgtgtccacgccagcgctcctagtggccatgcacgtggcctaccggagacatgagaagaagaggaagttcatcaagggggagataaagagtgaatttaaggacatcgaggagatcaaaacccagaaggtccgcatc

SEQ ID NO: 11119 - DNA, 201 bp, Artificial Sequence; identical to SEQ ID NO: 10951
  Synthetic polynucleotide

SEQ ID NO: 11120 - DNA, 201 bp, Artificial Sequence
  Synthetic polynucleotide
gagtagagtgtgggttggggggtcccaagggagggtgtgctgagctgcccccaccctgcccccaggtgctgaagggcttccctgagtgcctgcaggctgacatctgcctgcacctgaaccgctcactgctgcagcactgcaaacccttccgaggggccaccaagggctgccttcgggccctggccatgaagttcaagacca

SEQ ID NO: 11121 - DNA, 201 bp, Artificial Sequence
  Synthetic polynucleotide
taacatttataatctgattctttttcttttgggctactcagttatgctaattaagttcctttatctgcagatatgaaaatgagcagccatttcgaaaggcggcagaagaggaaattaactctctgtataaagtcattgatgaggctaatttgactaaaatggacctggagagtcaaatagaaagtctgaaagaagaacttg

SEQ ID NO: 11122 - DNA, 213 bp, Artificial Sequence
  Synthetic polynucleotide
atagaagactccttcacggctttctttttggcctcggcggcagcggctgccaccacactccccggctttcggccccgtttcttgggaatggcctgagggtcggcctcagcttttcgcttcctgccggggcgtttgatcaccatgacctgggtggatgtggtggccccacccccctcagccttgccccctggcgaagtttgaaaaggcatcttg

SEQ ID NO: 11123 - DNA, 201 bp, Artificial Sequence
  Synthetic polynucleotide
tctctccctgttcccctgcagaaggccgggagtgtgtcaactgtggggccacagccacccctctctggcggcgggacggcaccggccactacctgtgcaatgcctgtggcctctaccacaagatgaatgggcagaaccgaccactcatcaagcccaagcgaagactggtaggagcgggcacaggtggctgggagggggctg

SEQ ID NO: 11124 - DNA, 201 bp, Artificial Sequence
  Synthetic polynucleotide
tgttctcggcctgcagagggaggctggcgggtgtgcgctgaactttgggccccgcgggagcagcacggtcaccattccacgggagcggctggcggctggcgtggagtacaccttcagcctgaccgtgtggaaggccggccgcaaggaggaggccaccaaccagacggtgggtgccgcccgcccctcggccacttgccttgg

SEQ ID NO: 11125 - DNA, 201 bp, Artificial Sequence; identical to SEQ ID NO: 10718
  Synthetic polynucleotide

SEQ ID NO: 11126 - DNA, 208 bp, Artificial Sequence
  Synthetic polynucleotide
gctggctctgcaccgcatcaggactgtgctcatgttccgggacagcaggcagtccagcaatgaggtcaaggtcatccagcaggacaacagatggctgcatccacactgcctctgagaaagccacctctagggttttttgtatgttttcaagcctttttccttaatacagaagatatgaaatggtttcagtatcatttcagtgctggga

SEQ ID NO: 11127 - DNA, 201 bp, Artificial Sequence
  Synthetic polynucleotide
actctggaatgttctggaaatttctggaatcttctggtatagctgatgatctcgttcctgccctgactccgcttcttctgccccaggagtgaactggtgtgagaggaccaccctgagcaatggcggctgccagtatctgtgcctccctgccccgcagatcaacccccactcgcccaagtttacctgcgcctgcccggacgg

SEQ ID NO: 11128 - DNA, 210 bp, Artificial Sequence; identical to SEQ ID NO: 11104
  Synthetic polynucleotide

SEQ ID NO: 11129 - DNA, 201 bp, Artificial Sequence
  Synthetic polynucleotide
cactgttacctaatttttaggaaattgatgtggaagtgaggaaggagattgaggatgctgcccagtttgccacggccgatcctgagccacctttggaagagctgggctaccacatctactccagcgacccaccttttgaagttcgtggtgccaatcagtggatcaagtttaagtcagtcagttaaggggaggagaaggaga

SEQ ID NO: 11130 - DNA, 201 bp, Artificial Sequence
  Synthetic polynucleotide
aatgtggttttaatttcatcatgtttcatataggattcacctttatttgatcttattaaacaatcaaaggaccgagaaggaccaactgatcaccttgaatctgcttgtcctcttaatcttcctctccagaataatcacactgcagcagatatgtaagcaaaatatatgttatgttgaccattcaaactgcaaatagatttt

SEQ ID NO: 11131 - DNA, 201 bp, Artificial Sequence
  Synthetic polynucleotide
cgcccgccggggagcccacgcaggaggcctccggggtcgcggcggccaaagctggcatgaaccgggtattcctgcagcggctcctgtggctcctgcggctgctgttcccccgggtcctgtgccgggagacggggctgctggccctgcactcggccgccttggtgagccgcaccttcctgtcggtgtatgtggcccgcctgg

SEQ ID NO: 11132 - DNA, 206 bp, Artificial Sequence
  Synthetic polynucleotide
tgagcaagccgctggctctgcaccgcatcaggactgtgctcatgttccgggacagcaggcagtccagcaatgaggtcaaggtcatccagcaggacaacagatggctgcatccacactgcctctgagaaagccacctctagggttttttgtatgttttcaagcctttttccttaatacagaagatatgaaatggtttcagtatcatt

SEQ ID NO: 11133 - DNA, 201 bp, Artificial Sequence
  Synthetic polynucleotide
gaaatgttggataaagcataatttgtcaagtctcaactaattaaggtttaattcatgctttgcacaaaaattttgtgtttaggctgctgaaagccttcacaagaccattgttaagaggcgaatgtcccatgtgagtggaggaggatccatagatttgtctgacacagactccctacaggaatggatcaacatgactggctt

SEQ ID NO: 11134 - DNA, 201 bp, Artificial Sequence
  Synthetic polynucleotide
ggggacagtagcccctgctcggccttcgagttccactgcctaagtggcgagtgcatccactccagctggcgctgtgatggtggccccgactgcaaggacaaatctgacgaggaaaactgcggtatgggcggggccagggtgggggcggggcgtcctatcacctgtccctgggctcccccaggtgtgggacatgcagtgatt

SEQ ID NO: 11135 - DNA, 201 bp, Artificial Sequence
  Synthetic polynucleotide
cccaggccaggaggcccctggggggccagagatgggtaaggggaggtactggcctcaggccaaaggtgctgccgcctccgcagggaacaccagctggctgatgagcctggagaacccgctcagccctttctcctcggacatcaacaacatgcccctgcaggagctgtctaacgccctcatggcggctgagcgcttcaagga

SEQ ID NO: 11136 - DNA, 201 bp, Artificial Sequence
  Synthetic polynucleotide
tgggcgtgcgccgcacggacaagggcgacctgagcctacgctgcgatgagctggtgcgcacccaccacatcctcattgacctgcgccaccgccccaccgccggcgccttcaaccactcagacctggacgccgagctgaggcggctcttccgcgagcgctatcggctgcaccccaagttcgtggcggccgtgcactacgagc

SEQ ID NO: 11137 - DNA, 201 bp, Artificial Sequence
  Synthetic polynucleotide
ttaaacaatcttttaaaatgtcattttagcttatactgcaaaaggaacttcatgtagtctatgctttatcacatgtatgtggacaagaccgaacactactggccagcatcctactgaggatttttcttcacgaaaagcttgaatcgttgttgttatgcacactaaatgacagagaaataagcatggaaggtatggtatggc

SEQ ID NO: 11138 - DNA, 201 bp, Artificial Sequence
  Synthetic polynucleotide
gctcatctgtttattttctgtccactacagaggcaccaagtctgaaggaggcagaagggaaagaacctgagctcttcctaagtagatccaggcctgtggcagccaaggccaagcaggcccatctcacaaccctgaagcacatacaagcaccctggtggaagaagcttggagaagaatctggagatgagattgatgttccaa

SEQ ID NO: 11139 - DNA, 201 bp, Artificial Sequence; identical to SEQ ID NO: 11013
  Synthetic polynucleotide

SEQ ID NO: 11140 - DNA, 201 bp, Artificial Sequence
  Synthetic polynucleotide
ccttctctgcctcctccagctcagcccagcttctgtctcggtaccgacctcgggcagcagtcattgctgtcacccgctctgcccaggctgcccgccaggtccacttatgccgaggagtcttccccttgctttaccgtgaacctccagaagccatctgggcagatgatgtagatcgccgggtgcaatttggcattgaaagtg

SEQ ID NO: 11141 - DNA, 201 bp, Artificial Sequence
  Synthetic polynucleotide
gagtcacccaacctttctgcacacaggcttcatcgcctcagacatgacctcccgcaactcgagcacgcagctgtggctcatcacgcactaccacgagcacggctccctctacgactttctgcagagacagacgctggagccccatctggctctgaggctagctgtgtccgcggcatgcggcctggcgcacctgcacgtgga

SEQ ID NO: 11142 - DNA, 201 bp, Artificial Sequence
  Synthetic polynucleotide
gaaggaggcctgtacctggctgtgaccctgttggcaggcatcactggagttgtcatcacgctgtgcctcatattaattatcacttcctccaccaaaaccatccggaggtcttactttgaagtcttttggtacacacatcatctctttgtgatcttcttcattggccttgccatccatggagctgagtgagtgtttaaattc

SEQ ID NO: 11143 - DNA, 201 bp, Artificial Sequence
  Synthetic polynucleotide
tcggggccgccagtaccaggagctccctcgatgccccgcccccacccccagcctcctcaacatccccctctccagcccgggtcggcggccccggggcgacgtggagagcaggctggatgccctccagcgccagctcaacaggtgagggagtgcaggtggggtgggggggcacgccctggagtctggtccaggtcctggcgg

SEQ ID NO: 11144 - DNA, 201 bp, Artificial Sequence
  Synthetic polynucleotide
caagagcaagttcggcagcggctactccctgcgggccaaggtgcagagtgaagggcaacaggaggcgctggaggagttcaaggccttcgtggacctgacctttccaggtgtgtgccggccccggcagcccccactgggtgggccctgggcccctacctaggcctctcccatctgctgtgcggagcgtctgtgcctcgcccc

SEQ ID NO: 11145 - DNA, 201 bp, Artificial Sequence
  Synthetic polynucleotide
aggagactattacgttcctctataaattcattaagggagcttgtcctaaaagctatggctttaatgcagcaaggcttgctaatctcccagaggaagttattcaaaagggacatagaaaagcaagagaatttgagaagatgaatcagtcactacgattatttcggtaactaactaactataatggaattataactaactgac

SEQ ID NO: 11146 - DNA, 201 bp, Artificial Sequence
  Synthetic polynucleotide
atccaaagtgcagagtctccacttgtggaacaatggtaggaatcatttaatttttaatttatattccggcacttggcctgactacaccgaggacgtggggtttgacatcggccaggcgatgctggccaaagccagcatcagtactgaaaacttccgacccaactttgatgtttctattcccctcttttctaaggatcatcc

SEQ ID NO: 11147 - DNA, 201 bp, Artificial Sequence
  Synthetic polynucleotide
ctcttcccgattgcagatgtggatccagctgttgtacagtgcctgcttctggtggctgttttgctatgcagtggatgcttatctggtgatccggagatcggcaggactgaggtattcaccgaggaaatgggatttctgccctagttctattttagagggaagataagagatggcactgagcgtttaaaagtattttgcagt

SEQ ID NO: 11148 - DNA, 201 bp, Artificial Sequence
  Synthetic polynucleotide
gtgaactcgtacaatggcctgggaggcccgccggccgcacccccgcctccgccgcacccccacccgcatccgcacgcacaccatctgcacgcggccgccgcaccgccgcctgccccaccgcaccacggggccgccgcgccgccgccgggccagctcagccctgccagcccagccaccgccgcgcccccggcgcccgcgccc

SEQ ID NO: 11149 - DNA, 201 bp, Artificial Sequence
  Synthetic polynucleotide
cctgctttgtagacatctcatcccaaagcttgaaattgtctttttttttctttcccaaaagtaccagaataggagttttcctctgtggacctgaagccttggctgaaaccctgagtaaacaaagcatctccaactctgagtctggccctcggggagtgcatttcattttcaacaaggaaaacttctaacttgtctcttcca

SEQ ID NO: 11150 - DNA, 201 bp, Artificial Sequence
  Synthetic polynucleotide
ggatgtcctcatgctccctggtgacctcgttggcttgcagcacgacgctggccctggcgccctcctgcactgctcgccggctcccggccaccctggtccccgggccccgtacctctccgccaacgcctcgtcatggctgccccacttgccagcccagctggagggcacttgggcctgccctgcctgtgccctgcggctgct

SEQ ID NO: 11151 - DNA, 201 bp, Artificial Sequence
  Synthetic polynucleotide
tagtgacagccgcttcttgctgggcagctggctagagcaggcccgagcagcggcagtcagtgaggccgaggccgatttctacgagcagaacagccgctaccagctgaccttgtgggggccagaaggcaacatcctggactatgccaacaagcagctggcggggttggtggccaactactacacccctcgctggcggctttt

SEQ ID NO: 11152 - DNA, 201 bp, Artificial Sequence; identical to SEQ ID NO: 10990
  Synthetic polynucleotide

SEQ ID NO: 11153 - DNA, 201 bp, Artificial Sequence
  Synthetic polynucleotide
agttcacccatgcagggcagggagggctgattgaagagcccacaggtgatgagctaccaaccaagaaggggcggaggaaccgtttcaagtggggcccagcatcccagcagatcctgttccaggcctatgagaggcagaagaaccctagcaaggaggagcgagagacgctagtggaggagtgcaataggtacaacggcgggc

SEQ ID NO: 11154 - DNA, 201 bp, Artificial Sequence
  Synthetic polynucleotide
gcacagcctcaaccccgacgcctcgggctccagctgcagcctggcccggacgcgctcccgagaaagctgcgccagcgtgcgccgcgcctcgtcggccgacgacatcgaggccatgcgcgccggggtgctgcccccgccaccgcgccacgccagcaccggtgagggcgccgcgggacccgttccgccccagcccacgcttct

SEQ ID NO: 11155 - DNA, 201 bp, Artificial Sequence
  Synthetic polynucleotide
ccctgtggctgtcaggcctgagggtcgggtggggcgtggggaaagtccctgactcggctggatctccctgtggcagggttgcttcacccacaccgtcatgtactacggccactacagtaacgccacgctgaaccagccgtgtggcagccccctggatggcagccagtgcacacccagggtgggtggcctgccctacaacat

SEQ ID NO: 11156 - DNA, 201 bp, Artificial Sequence; identical to SEQ ID NO: 11026
  Synthetic polynucleotide

SEQ ID NO: 11157 - DNA, 209 bp, Artificial Sequence
  Synthetic polynucleotide
tctccttcacttactgctgtggactctccttaggggaatgtcgggtgcttcttcctcaagcagctcagcactttgtaggagagcatggatctctgggtgcagatcctccatactagcttcccctgaggccagtgctctgcagtgcaataccaaggcgacatctggattataaaaatgaaaataccggcatactctacttgcttcatgca

SEQ ID NO: 11158 - DNA, 201 bp, Artificial Sequence
  Synthetic polynucleotide
tgggatgatctacagcttgcctggcctgaaaatgtatgagcaagagtgggtgaggttacacctgctgaacataggcggctcccaagacattcacgtggttcactttcacggccagaccttgctggaaaatggcaataaacagcaccagttaggggtctggccccttctgcctggtaaagattgggtaatgggaagaggtcc

SEQ ID NO: 11159 - DNA, 201 bp, Artificial Sequence
  Synthetic polynucleotide
gcctcttgactcctactgtcctccctcctcccacaggatgtcctctagggttttatggaaaagattgtgcactgatatgccaatgtcaaaacggagctgactgcgaccacatttctgggcagtgtacttgccgcactggattcatgggacggcactgtgagcagagtaagtatgagagtgtggcatcactgggtggtattt

SEQ ID NO: 11160 - DNA, 201 bp, Artificial Sequence
  Synthetic polynucleotide
ccaccattcagggagcctgggaggtgcctttcgcacccagacccccgtgggctctctcctgatggctcctgcccttttcccttccctcctcagcccccagtgcctggtgctcacggggccccccaacttccgcccggccctggtggactttgtgggcaccttcacccggaacctcagcctgatgatctgtggccacgtgct

SEQ ID NO: 11161 - DNA, 201 bp, Artificial Sequence
  Synthetic polynucleotide
ccaccacggcatccggccctgcgtcatctcgcgccagctgcgcgtgtcccacggctgcgtctccaagatcctgtgcaggtaccaggagactggctccatacgtcctggtgccatcggcggcagcaagcccaaggtgagcgggcgggccttgccctcctggctcccagactgtggtcccctgtgttggggaagaccgggcgg

SEQ ID NO: 11162 - DNA, 201 bp, Artificial Sequence
  Synthetic polynucleotide
ttctccctccccacccttggtgcagaggaggctggcagctgtgtgcaggatgggcagaggtataatgataaggatgtgtggaagccggagccctgccggatctgtgtctgtgacactgggactgtcctctgcgacgacataatctgtgaagacgtgaaagactgcctcagccctgagatccccttcggagagtgctgcccc

SEQ ID NO: 11163 - DNA, 201 bp, Artificial Sequence
  Synthetic polynucleotide
agctaagagggaagcctggctgcagttgagggccgaaattgaagccctgaccgactcctggttgacactggccctgaaagcactctcgctcattcactcccggtgaggctctctgcggggtctttgccaggaaatgggcaatgctcgtgcttgttcattttggagatttatttttcaacagtctttgttttctttttgttc

SEQ ID NO: 11164 - DNA, 201 bp, Artificial Sequence
  Synthetic polynucleotide
gtaggcacgtgctagggggggccctggggcgccccctcccgggcactccctgagggctgcacggcaccgccacaggcactgcacccgttcgcggcggacgacacctgccggaccagccagggctccccggctttccagccgcccgagattgccaacggcctggacaccttctccggcttcaaggtggacatctggtcggct

SEQ ID NO: 11165 - DNA, 201 bp, Artificial Sequence
  Synthetic polynucleotide
ggcccctgctggctcgtggcgcggggcggctgcggagggccccgcgcctggtcccagtgcggcggcggagggctccgagcctggtcccagcgcagcgcagccggacgcgtctgccggccccctggcccggctggcacggagcagagccgcgggctggggcacggctcgacgtcgagaggcggcccctgggtggggacaggg

SEQ ID NO: 11166 - DNA, 203 bp, Artificial Sequence
  Synthetic polynucleotide
cggaaaaatctattatagccccagcattctccaacttcaaagtcagatgcaaattctcgaatgatattttttgtaggatcattacaggactggtgaaccatctctacacgatattcatatctaaaattgaaaaacagaccattactatacagttagtaaagtaagaataaaaaacaaactcatctaaacattaaggtcactaa

SEQ ID NO: 11167 - DNA, 212 bp, Artificial Sequence; identical to SEQ ID NO: 11037
  Synthetic polynucleotide

SEQ ID NO: 11168 - DNA, 201 bp, Artificial Sequence
  Synthetic polynucleotide
ctgggaagatgagatgaggatcccatgccctaatcgccaattctgacccattcctcgatgtctatagacctgatcgtgggagcttacggggccaaccaggtggctgtgtacaggtgagcactggctccaggggcgggatggggaaggtcctgtgccatcaagaggaggccaggccaggaggagccacaatggcaagcctac

SEQ ID NO: 11169 - DNA, 201 bp, Artificial Sequence
  Synthetic polynucleotide
acttggggatggtggaggagtggggaggggtatcttgggcctagctaagttgtgtttttctttttcatttcacagggtccttctggtcctgttggtcctgctggtgctgttggcccaagaggtcctagtgtatgtacatgctgaagatttctttgcaacactaacatttagagagaatcagtccaaaacatctgttaagaa

SEQ ID NO: 11170 - DNA, 201 bp, Artificial Sequence
  Synthetic polynucleotide
gcaagagctccctgttccggatcctgggtgggctctggcccacgtacggtggtgtgctctacaagcccccaccccagcgcatgttctacatcccgcagaggtaaggaagcccgtgcgcctctcctccacctcttcctgcctgtgcgctcacacatggcttcctgcagaggcccaggaagtggtgaagagtcagcacctcag

SEQ ID NO: 11171 - DNA, 201 bp, Artificial Sequence
  Synthetic polynucleotide
gcgcagcggccgctgccgccgccgccgccgccgccgccgccgctgggggcctggcgctggggctgcaccctgggggcgcgcagggcggcgcgggcctcccggcgcaggcggcgctctacggccacccggtctacggctactccgcggcggcggcggcggctgcgctggcgggccagcacccggcgctctcctactcgtacc

SEQ ID NO: 11172 - DNA, 201 bp, Artificial Sequence
  Synthetic polynucleotide
cagggctgctgagggaagggactgaggtgcgcgtgtctctgcagcccaggggtcactgtccttctgcatgctggaagccagccaggacatgggccgcacgctcgagtggcggccgcgtactccagccttggtccggggctgccacttggaaggcgtggccggccacaaggaggcgcacatcctgagggtcctgccgggcca

SEQ ID NO: 11173 - DNA, 201 bp, Artificial Sequence
  Synthetic polynucleotide
cggagaccgacgaggacgagggcgcgggcgcggcggaggcgggcgcggaaggcgcggaggagggcgcggcggggctcgagggcacggcggccacggcggcggcgggggcgacggcgcgggttgtggcggccgcaggccgggccctgcgaggcctcagctaccgcagcctgcggcggcgcgtgcggcggctgcggcggctta

SEQ ID NO: 11174 - DNA, 201 bp, Artificial Sequence
  Synthetic polynucleotide
agccaccaggcgtggctctgcccacggtctcaccacctggtgtggatgccaaagcccaggtgaagacagagaccgcggggccccaggggcccccacactacaccgaccagccatccacctcacagatcgcctacacctccctcagcctgccccactatggctcagccttcccctccatctcccgcccccagtttgactact

SEQ ID NO: 11175 - DNA, 201 bp, Artificial Sequence
  Synthetic polynucleotide
cgagcccttggggcgcactcgctcagctgtcttcggttctctctgcaggtgagcagcagtactcggtgccgcccccggtctatggctgccacacccccaccgacagctgcaccggcagccaggctttgctgctgaggacgccctacagcaggtaggaaggcgctgggctctgcgtctgggtccttgggaccccggagggga

SEQ ID NO: 11176 - DNA, 201 bp, Artificial Sequence
  Synthetic polynucleotide
gccaaaggcaaagtggccaacactaatgtgaccttgcaggcactacggggcaccaaggtggcggtgaatcagcggagcgcggatgcactccctgcccccgtgcctggtgccaacagcatcccgtgggtcctcgagcagatcttgtgtctgcagcagcagcagctacagcagatccagctcaccgagcagatccgcatccag

SEQ ID NO: 11177 - DNA, 201 bp, Artificial Sequence
  Synthetic polynucleotide
aggcggaggccccctcttccccaggcctgcgtagatatccctcagctgctggaggaggcggtgggggcgggggctccgggcagtgctggcggcgtcctggctgccctgctggaccatgtcaggagcgggtcttgcttccacgccttgccgagccctcagtacttcgtggactttgtgttccagcagcacagcagcgaggtc

SEQ ID NO: 11178 - DNA, 201 bp, Artificial Sequence
  Synthetic polynucleotide
tacagcctaggcagcatctacactcgcctgtatgggcagtcccctccagactcgcacacggctgagggtgatgtcctggccctgctcagcatctgtcagtggagaccacaggccctgctgcggtgggtggatgctcacgccaggcctttcggcaccatcaggcccatgtatggggtcacagcctctgctaggaccaagcca

SEQ ID NO: 11179 - DNA, 201 bp, Artificial Sequence; identical to SEQ ID NO: 11143
  Synthetic polynucleotide

SEQ ID NO: 11180 - DNA, 203 bp, Artificial Sequence
  Synthetic polynucleotide
ctggagccaccaccagagcttctggcactggaaatggagctgccagaactgctggagccactgtagctactgaaaccgctggagtcacccttcccagtgaggcaggggtcgttaggggaggtgatacgcgtggggtccttacaagggtctgagaaggtgccaatgctcttagccaaggtccctgtggaggaaagcagtggtta

SEQ ID NO: 11181 - DNA, 201 bp, Artificial Sequence
  Synthetic polynucleotide
cactggggagaggctccccgcagcccactctgactgtgccctctgccctgcaggagagtatgacctgcggcgctgggagaagtgggagctggacctggacatcaaggaggtcttcgtccaccccaactacagcaagagcaccaccgacaatgacatcgcactgctgcacctggcccagcccgccaccctctcgcagaccat

SEQ ID NO: 11182 - DNA, 201 bp, Artificial Sequence
  Synthetic polynucleotide
atctgcttatgaccaggagccactcaagcagcactctcccttcacaggtggtattccaaacacatgactcggagtcaggctgagcaactgctaaagcaagaggtaagtgtggaaccactagcacacagcattctccttgcataagtgaggatcttgaactgagggcctgttctgccccctacctttgggcaaggcagtgtc

SEQ ID NO: 11183 - DNA, 201 bp, Artificial Sequence
  Synthetic polynucleotide
gccggacaggcagccccggtgagggagcccacgtgtcagcagctgtggccaagactgtgaggatgacgctagtgattgtggtcgtctatgtgctgtgctgggcacccttcttcctggtgcagctgtgggccgcgtgggacccggaggcacctctggaaggtgggtgtagccgtggctagggctgacggggccacttgggct

SEQ ID NO: 11184 - DNA, 201 bp, Artificial Sequence; identical to SEQ ID NO: 10743
  Synthetic polynucleotide

SEQ ID NO: 11185 - DNA, 201 bp, Artificial Sequence
  Synthetic polynucleotide
ggagctgggaccacagtggctgagcttccggtgtgtcttccaggagaccctgtgaagccgtctcggggcccgctggtgacctgcacgtgtgagagcccacattgcaaggggcctacctgccggggggcctggtgcacagtagtgctggtgcgggaggaggggaggcacccccaggaacatcggggctgcgggaacttgcac

SEQ ID NO: 11186 - DNA, 201 bp, Artificial Sequence; identical to SEQ ID NO: 10816
  Synthetic polynucleotide

SEQ ID NO: 11187 - DNA, 201 bp, Artificial Sequence
  Synthetic polynucleotide
attcttacggcctgatgttcgacctgcctctccccagagtcctgcctctgccccctggagatgaatgtggcccaggaattccagctccgacgacggcagctggggagccaaggaagttcctggagcaagtggagcagccccgtgtgcgttccccctggtaagatcactctgagtacaggaacaggggcaagcattagaaat

SEQ ID NO: 11188 - DNA, 203 bp, Artificial Sequence
  Synthetic polynucleotide
agaggctctgagaagaagaccagcggccccctttctcctcccacagggcctcctggcccggcgcctgcaggccccgccgtgcggctggggtccgtgccctactccctgctcttccgcgtcctgctgcagtgcttgaagcaggtgagtggggccgggcagggaccatccgtcccacgttgggccaggaggacagggagctgcca

SEQ ID NO: 11189 - DNA, 201 bp, Artificial Sequence
  Synthetic polynucleotide
tgtctattttgcttcttttagatgtaacatgtaacattaagaatggcagatgcgagcagttttgtaaaaatagtgctgataacaaggtggtttgctcctgtactgagggatatcgacttgcagaaaaccagaagtcctgtgaaccagcaggtcataatctgaataagattttttaaagaaaatctgtatctgaaacttcag

SEQ ID NO: 11190 - DNA, 201 bp, Artificial Sequence
  Synthetic polynucleotide
gctgccctctcgctcctccaggggctccaaggtatccccggatgtgcccccacccagcgctggctccgatgcctcgcacccctccacctcctccagccagctggatgggctgagcgtgagcctgggccggctggggacaaggtgtgagcctgagccctcccgcctccaagccgtgttcgaggccctgctcacccagtttga

SEQ ID NO: 11191 - DNA, 201 bp, Artificial Sequence
  Synthetic polynucleotide
ggtaagcagtggccccgaacctacccccaaacccgggctcgctcccgggaggcggggcccgctctcactggctctccctccagccggcggccagaaatgcacggtctccatcaacgtcctgctcgcccagaccgtcttcttgttcctcattgcccagaaaatcccagagacttctctgagcgtgccgctcctgggcaggtg

SEQ ID NO: 11192 - DNA, 201 bp, Artificial Sequence
  Synthetic polynucleotide
ggaccccatgttactgaagtggaagggaccagtttcttaactggaattattagctggggtgaagagtgtgcaatgaaaggcaaatatggaatatataccaaggtatcccggtatgtcaactggattaaggaaaaaacaaagctcacttaatgaaagatggatttccaaggttaattcattggaattgaaaattaacagggc

SEQ ID NO: 11193 - DNA, 207 bp, Artificial Sequence; identical to SEQ ID NO: 10878
  Synthetic polynucleotide

SEQ ID NO: 11194 - DNA, 201 bp, Artificial Sequence
  Synthetic polynucleotide
aatcagatttggacaccctggctaaagaagcatccatcccaattatcaatgggctgtcagatttgtaccatcctatccagatcctggctgattacctcacgctccaggttggtttatttatttgtcttacaaaagagcaaaatcaaataattcctgacttgctttaagtgaaacagtttacttaaatcatggtattggtgt

SEQ ID NO: 11195 - DNA, 201 bp, Artificial Sequence
  Synthetic polynucleotide
ttttcatttcctcattggaagaagaagcatagtatagaagaaaggcaaacacaacacattcaacctctgccaccatggggaactgggctgtgaatgaggggctctccatttttgtcattgtaagtaccaacaagagataagttataaattctctgacttctcggggttatcttggaactaaaatagaccaaagcttttttg

SEQ ID NO: 11196 - DNA, 201 bp, Artificial Sequence
  Synthetic polynucleotide
cgcagagctccaagagggcgcgcgccagaagctgcacgagctgcaagagaagctgagcccactgggcgaggagatgcgcgaccgcgcgcgcgcccatgtggacgcgctgcgcacgcatctggccccctacagcgacgagctgcgccagcgcttggccgcgcgccttgaggctctcaaggagaacggcggcgccagactggc

SEQ ID NO: 11197 - DNA, 208 bp, Artificial Sequence
  Synthetic polynucleotide
tagaaaggctggggtgttgggctcatggattgggtcatgtgggcccattttaccttttgaagtattgctcccccagtggattgggtggctccattcactccaatgctgagcacttccacagagtgggttaaagcggctccgaacacgaaacgtgtagcgtttctgcccatccacactaggcaaggagaacttatgtctataatccact

SEQ ID NO: 11198 - DNA, 201 bp, Artificial Sequence
  Synthetic polynucleotide
gtgtttgtgacactcttgtgaccgtgccaagaaaacgtaagcaaatatcaagcctccaaatcctaatgcaacaagtcctgaatcccttgcaggtatgtcctggatgatgaatacacaagctcagtaggctccaaatttccagtccggtggtccccaccggaagtcctgatgtatagcaagttcagcagcaaatctgacatt

SEQ ID NO: 11199 - DNA, 201 bp, Artificial Sequence
  Synthetic polynucleotide
ggaactcttacacgtgtaggagccaaacatgagagacacatatttctctttgatggcttaatgatttgctgtaaatcaaatcatgggcagccaagacttcctggtgctagcaatgcagaatatcgtcttaaagaaaagttttttatgcgaaaggtacaaattaatgataaagatgacaccaatgaatacaagcatgctttt

SEQ ID NO: 11200 - DNA, 201 bp, Artificial Sequence
  Synthetic polynucleotide
tcaagcacttagcaagcccctggcacttgataaagcttagtaaatatagctaattgtggtgacactcttcttcaatttatcaaggcaccaaaaacccctctgcagaagagcatggacctcttaggaaaacaactttccttttactcctttggtataataggtaagagaagagtgagtatgtatatatttttatttgagttt

SEQ ID NO: 11201 - DNA, 201 bp, Artificial Sequence
  Synthetic polynucleotide
caataccgccaggtggccagcccgcggaccgacccctactcggcggcgcaactccacaaccagtacggccccatgaatatgaacatgggtatgaacatggcagcagccgcggcccaccaccaccaccaccaccaccaccaccccggtgcctttttccgctatatgcggcagcagtgcatcaagcaggagctaatctgcaag

SEQ ID NO: 11202 - DNA, 201 bp, Artificial Sequence
  Synthetic polynucleotide
gcaaaatagcccagtataagcgggagtgcccgtccatctttgcttgggaaatccgagacagattactgtccgagggggtctgtaccaacgataacataccaagcgtaagttcattgagaacatctgccctccctgccctaagcccaatgctctctcctctttacctcctcccaccctctctctccactgtctcttagtctg

SEQ ID NO: 11203 - DNA, 201 bp, Artificial Sequence
  Synthetic polynucleotide
gtagctgttgtttttaactttttattccaaaatacggctgttccaaaaaatcttgaccttgatattttttcttctagtccttcttggaatggccttggaagcatccctagcacagatatctacaaaagtaccaagaattacaaaaacgtaagtacctttgtgagacatttgctggacttgggtttactagcctgaagtttc

SEQ ID NO: 11204 - DNA, 203 bp, Artificial Sequence; identical to SEQ ID NO: 11180
  Synthetic polynucleotide

SEQ ID NO: 11205 - DNA, 203 bp, Artificial Sequence
  Synthetic polynucleotide
ccttcactactctgctaccagataaataacaggagatttaacaatcatcacatggaaaaccattccctgaataacacagccttctctgtctctcttggcagtcggtcttggcagctgttgtaattgccaacctgaaagggatgtttatgcagctgtgtgacattcctcgtctgtggagacagaataagattgatgctgtaagt

SEQ ID NO: 11206 - DNA, 201 bp, Artificial Sequence; identical to SEQ ID NO: 11017
  Synthetic polynucleotide

SEQ ID NO: 11207 - DNA, 204 bp, Artificial Sequence
  Synthetic polynucleotide
aacaccgagctcaggttggaatgatctaaggacacaaaagcatggggcctcggggctggggcggtgcgactaccggaggcgcaagttgcgcacggggtcccgggagcgatacactgcctccccggtgtcagtgctccagacggtctccgccatgacagctgcgacgcgccgcgactgcgccggaaagcgcgccgctctgttttc

SEQ ID NO: 11208 - DNA, 201 bp, Artificial Sequence; identical to SEQ ID NO: 11013
  Synthetic polynucleotide

SEQ ID NO: 11209 - DNA, 201 bp, Artificial Sequence
  Synthetic polynucleotide
cagtcctgtcatccagctgcagcccaccttcacacccatgcgggtcgcactggctggcacattccactactacagctgcgagagagccaaaaaggccatgggctaccagccactagtgaccatggatgatgctatggagaggaccgtgcagagctttcgccacctgcggagggtcaagtgagggacactggaggctgggct

SEQ ID NO: 11210 - DNA, 212 bp, Artificial Sequence; identical to SEQ ID NO: 11101
  Synthetic polynucleotide

SEQ ID NO: 11211 - DNA, 201 bp, Artificial Sequence
  Synthetic polynucleotide
atgtggaggatgaggtgggaggagggacggcagccctgcttctcttctgcccagcttcaaggagcggttccatgccagcgtgcgcaggctgacgcccagctgcgagatcaccttcatcgagtcggaggagggcagtggccggggcgcggccctggtctcggcggtggcctgtaagaaggcctgtatgctgggccagtgaga

SEQ ID NO: 11212 - DNA, 201 bp, Artificial Sequence; identical to SEQ ID NO: 11008
  Synthetic polynucleotide

SEQ ID NO: 11213 - DNA, 201 bp, Artificial Sequence
  Synthetic polynucleotide
aagtgccgttaggccaagcaggtgctaaaagcccggggtcgtggaccccggccaggtcttagcagcatggaggcgcagggtgtagcggagggcgcggggccgggcgccgccagcggcgtgccccaccccgcggccctagccccggctgcggctcccaccttggcgccagcctcggtggcggccgcggcctctcaattcacc

SEQ ID NO: 11214 - DNA, 201 bp, Artificial Sequence
  Synthetic polynucleotide
gtgttcattgcaggaagagtaaataaaggtggtattttgattagaagtgccagaggaattttcttctggatttttgcaaatggatcttacagggttacaggtgatttaggtaactgactttttttttttttaatagcatatgacttatgggctatgttactttgagcacctacttgttatttgtgggagtgataaaaagaa

SEQ ID NO: 11215 - DNA, 206 bp, Artificial Sequence; identical to SEQ ID NO: 10880
  Synthetic polynucleotide

SEQ ID NO: 11216 - DNA, 201 bp, Artificial Sequence
  Synthetic polynucleotide
atcagcgctctagtcacgattgccaccaagaccttcctccgttatgatcggctacgggctctcatcaccagtatccgccgcttctacccaacggttaccgtggtcatcgctgacgacagcgacaagccagagcgcgttagtggcccctacgtggaacactatctcatgcccttcggcaaggtgtgcagctagcaggctgaa

SEQ ID NO: 11217 - DNA, 201 bp, Artificial Sequence
  Synthetic polynucleotide
aaaaacagttatgaaaactggatctgcaggcctttcaggccaccatagagcacctagttacagtggtttatccatggtttctggagtgaaacagggatctggtcctgctcctaccactcataaggtattctgggacagtaactttaattgctgtctttttgcaaatagaaaaatttttaagatactattcctgcttaagtt

SEQ ID NO: 11218 - DNA, 201 bp, Artificial Sequence
  Synthetic polynucleotide
ggcctggccgccctcggcgtccgcggcgctcaacagcggcgcctcttatatcaagcagcagcccctgtccccctgtaaccccgcggccaaccccctgtccggcagcctctccacgcactccctggagcagccgtatctgcaccagaacagccacaacgccccagccgagctgcaaggtgagtggggaggccgagggcgccc

SEQ ID NO: 11219 - DNA, 201 bp, Artificial Sequence
  Synthetic polynucleotide
ttatcgtcgtctgtcttttcctgggcctttgcgatggcttcttcatcaccatcatggcccccattgcatttgagctggtgggcccaatgcaggcctcacaggccattggctacctcctgggcatgatggccctgccaatgattgctgggccccccattgcaggtgaggctgatattccagggagggcatgaatcagggagt

SEQ ID NO: 11220 - DNA, 201 bp, Artificial Sequence
  Synthetic polynucleotide
aggaaacacaagaccaatcggaagccgcgcacgccctttaccacatcccagctcctcgccctggagcgcaagttccgtcagaaacagtacctctccattgcagagcgtgcagagttctccagctctctgaacctcacagagacccaggtcaaaatctggttccagaaccgaagggccaaggcgaaaagactgcaggaggca

SEQ ID NO: 11221 - DNA, 201 bp, Artificial Sequence; identical to SEQ ID NO: 10933
  Synthetic polynucleotide

SEQ ID NO: 11222 - DNA, 203 bp, Artificial Sequence
  Synthetic polynucleotide
acctatcggccgtgctgggtctcagcgaggagagtctgcagtgccggcgcaggcagcgcggggacgcggggtccccttggggctgcccgctgtgccccgaccgtggccccgcagaggcgcagacgcaggcggaggggcaggggcaagggcaggggcaggggcaggggcaagggcaggggcaaggacaggggcaaggacagggg

SEQ ID NO: 11223 - DNA, 201 bp, Artificial Sequence
  Synthetic polynucleotide
gagagaaggaggccaagagaaaccgcaccttcgtcctcaacttcatcaagattcccgtggtcccgcacaatgagtgcagcgaggtcatgagcaacatggtgtctgagaacatgctgtgtgcgggcatcctcggggaccggcaggatgcctgcgagggcgacagtggggggcccatggtcgcctccttccacggcacctggt

SEQ ID NO: 11224 - DNA, 201 bp, Artificial Sequence; identical to SEQ ID NO: 11005
  Synthetic polynucleotide

SEQ ID NO: 11225 - DNA, 201 bp, Artificial Sequence
  Synthetic polynucleotide
tgccacgatgggaagtgcatctctcggcagttcgtctgtgactcagaccgggactgcttggacggctcagacgaggcctcctgcccggtgctcacctgtggtcccgccagcttccagtgcaacagctccacctgcatcccccagctgtgggcctgcgacaacgaccccgactgcgaagatggctcggatgagtggccgcag

SEQ ID NO: 11226 - DNA, 201 bp, Artificial Sequence
  Synthetic polynucleotide
gaaatacctaacactgctttggtgaaattttgtaaacctcttatccttagatccaaaagatatgttcatctaggcttgataagcacatgtgcatttataccacactctatagttctttgtggaccagtgcatggtctcattgaacaacatgaggatgctttacatggagcacttaaaatgcttcggcaattatttaaagac

SEQ ID NO: 11227 - DNA, 201 bp, Artificial Sequence
  Synthetic polynucleotide
aagaacgaggaactgcgtctttatcaccatctcttcaacaactatgacccaggaagccggccagtgcgggagcctgaggatactgtcaccatcagcctcaaggtcaccctgacgaatctcatctcactggtaagctacccccaccctcatcttaagccaaaaatcccacttctggccccaaccgctgagctctgtcctaaa

SEQ ID NO: 11228 - DNA, 206 bp, Artificial Sequence; identical to SEQ ID NO: 11087
  Synthetic polynucleotide

SEQ ID NO: 11229 - DNA, 201 bp, Artificial Sequence
  Synthetic polynucleotide
cccaccccctggccgtcgcgggacccgcaggactgagaccatggaggcggtggcggtggccgcggcggtgggggtccttctcctggccggggccgggggcgcggcaggcgacgaggcccgggaggcggcggccgtgcgggcgctcgtggcccggctgctggggccaggccccgcggccgacttctccgtgtcggtggagcg

SEQ ID NO: 11230 - DNA, 205 bp, Artificial Sequence
  Synthetic polynucleotide
accaatgtcatgcctcaagatcttgatgatgtttgtcagagcaggcaggctacgtttatccaaatgggtgaaaaattcatactcatctttctttaaacgagaaggtctagattcaatgtgggtcaggtttacatcattctcctagaagagagaatggggagggtgaggagacagtcactggaactaacgcaggccaaagatgcag

SEQ ID NO: 11231 - DNA, 201 bp, Artificial Sequence
  Synthetic polynucleotide
atgttcaggagaccccactcatgtttagcagatgtacttctgtcagttcacttgatagttttgagagtcgttcgattgccagctccgttcagagtgaaccatgcagtggaatggtaagtggcattataagccccagtgatcttccagatagccctggacaaaccatgccaccaagcagaagtaaaacacctccaccacctc

SEQ ID NO: 11232 - DNA, 201 bp, Artificial Sequence
  Synthetic polynucleotide
cccccgtgccccacagatcgcaagcaggactggtcagaccatgctatttggtgggaacagaagaggcagtggctgctgcagacccactggacactggacaagtacgggatcctggccgacgcacgcctcttctttgggccccagcaccggcccgtcatccttcggttgcccaaccgccgcgcactgcgcctccgtgccagc

SEQ ID NO: 11233 - DNA, 201 bp, Artificial Sequence
  Synthetic polynucleotide
tccctttcctctccttgagactaatgcccccacccccacccccaccccacctaccggacagatgaacagtttctgctgcagcggctggcagacggggccatcgacctctatgccatggtggtggttctctcgaggtgaggaggcaggcagggaatgcctgagccgcagggggcctgggcctggatcccagccggcccagat

SEQ ID NO: 11234 - DNA, 201 bp, Artificial Sequence
  Synthetic polynucleotide
gccgcctcccaaaggtgccacatactgctctctctttctcctccaggaagtccataggactgtcttcatgcgcttgaacatcatcagccctgacctgtctggtgagctccctccaggtctctcgggtttgttctagtggctgaggtcacagtagggcacagcgggcagccctgagaaacggcctgggcacatagcacatgg

SEQ ID NO: 11235 - DNA, 201 bp, Artificial Sequence
  Synthetic polynucleotide
tgtagagaggagggcgtgtgcaaggagtggggccaggagcggggctggacactgctggctccacacaggggcccagcagggagctcgtatgccgctcgtgcctgaagcagacgctgcacaagctggaggccatgatgctcatcctgcaggcagagaccaccgcgggcaccgtgacgcccaccgccatcggagacagcatcc

SEQ ID NO: 11236 - DNA, 201 bp, Artificial Sequence; identical to SEQ ID NO: 11044
  Synthetic polynucleotide

SEQ ID NO: 11237 - DNA, 201 bp, Artificial Sequence; identical to SEQ ID NO: 10728
  Synthetic polynucleotide

SEQ ID NO: 11238 - DNA, 201 bp, Artificial Sequence
  Synthetic polynucleotide
cactcgggcctgtccccacaggtgagtacctcctgaccgtgctggcatctaatgccttcgagaacctgacgcagcaggtgcctgtgagcgtgcgcgcctccctgccctccgtggctgtgggtgtgagtgacggcgtcctggtggccggccggcccgtcaccttctacccgcacccgctgccctcgcctgggggtgttcttt

SEQ ID NO: 11239 - DNA, 201 bp, Artificial Sequence; identical to SEQ ID NO: 11233
  Synthetic polynucleotide

SEQ ID NO: 11240 - DNA, 201 bp, Artificial Sequence; identical to SEQ ID NO: 11171
  Synthetic polynucleotide

SEQ ID NO: 11241 - DNA, 201 bp, Artificial Sequence
  Synthetic polynucleotide
catttctgttttcctgtagcaaaaccagaaatcctgacttacgacaggctcgtgaatggcatgctccaatgtgtggcagcaggattcccagagcccacaatagattggtatttttgtccaggaactgagcagaggtgagatgattatttttggcactgcttataatgcagaggggaaggactgcaattcacttgaatttca

SEQ ID NO: 11242 - DNA, 213 bp, Artificial Sequence; identical to SEQ ID NO: 11122
  Synthetic polynucleotide

SEQ ID NO: 11243 - DNA, 201 bp, Artificial Sequence
  Synthetic polynucleotide
ggccctgagcaatggcctggtgctggcggccctagctcggcggggccggcggggccactgggcacccatacacgtcttcattggccacttgtgcctggccgacctggccgtggctctgttccaagtgctgccccagctggcctggaaggccaccgaccgcttccgtgggccagatgccctgtgtcgggccgtgaagtatct

SEQ ID NO: 11244 - DNA, 201 bp, Artificial Sequence
  Synthetic polynucleotide
ctgagcaaagagaaaaacccaccgttgcagagactcatctcttcttcttctctcaccaggcttacaggaaatggataaatgacagaaggcagggacttgaggagcctcttctaccaggcatcacattcaccaacaaccagctcttcttcctgagttatgctcatgtgagtagactgaggaaggggcatcagggatgagatg

SEQ ID NO: 11245 - DNA, 201 bp, Artificial Sequence
  Synthetic polynucleotide
cttactgatcgattactacttttccctccccatagttaccgtacacgagaagaaattcaggaagtaagaagtaagagtgaccctattatgcttctcaaggacaggatggtgaacagcaatcttgccagtgtggaagaactaaaggtacagtcacttgttcatggtggtttgaaggttggctttaaaagttgccacccctgg

SEQ ID NO: 11246 - DNA, 201 bp, Artificial Sequence
  Synthetic polynucleotide
gttgttgttgattggaatcgaggagctacaactttaatatatacccatgcctctagtaagaccagaaaagtagccatggtcttgaaggaatttattgaccagatgttggtaagagaattctcttagatgattcagagctaagttgaaactggcccattatctgagggcttaaagccaagagatagctacagtgagcaggag

SEQ ID NO: 11247 - DNA, 201 bp, Artificial Sequence
  Synthetic polynucleotide
agagcccacattgcaaggggcctacctgccggggggcctggtgcacagtagtgctggtgcgggaggaggggaggcacccccaggaacatcggggctgcgggaacttgcacagggagctctgcagggggcgccccaccgagttcgtcaaccactactgctgcgacagccacctctgcaaccacaacgtgtccctggtgctgg

SEQ ID NO: 11248 - DNA, 201 bp, Artificial Sequence
  Synthetic polynucleotide
tacgtgttccaaggggacagtagcccctgctcggccttcgagttccactgcctaagtggcgagtgcatccactccagctggcgctgtgatggtggccccgactgcaaggacaaatctgacgaggaaaactgcggtatgggcggggccagggtgggggcggggcgtcctatcacctgtccctgggctcccccaggtgtggga

SEQ ID NO: 11249 - DNA, 201 bp, Artificial Sequence
  Synthetic polynucleotide
tttacaaagcgggttctaggagagagtggagagatggatgctctacgaatacagatggaagagcgattcatggcttccaatccttccaaggtctcctatcagccaatcactactactttaaaacgaaaacaagaggaagtatctgctgtcattattcagcgtgcttacagacgccaccttttaaagcgaactgtaaaacaa

SEQ ID NO: 11250 - DNA, 201 bp, Artificial Sequence
  Synthetic polynucleotide
gcggcacgtgtgtggagggcggcggcgcgcaccgctgctcctgcgcgctgggcttcggcggccgcgactgccgcgagcgcgcggacccgtgcgccgcgcgcccctgtgctcacggcggccgctgctacgcccacttctccggcctcgtctgcgcttgcgctcccggctacatgggagcgcggtgtgagttcccagtgcacc

SEQ ID NO: 11251 - DNA, 205 bp, Artificial Sequence
  Synthetic polynucleotide
agcccgaccccgggcaagcgcggcaagaagggcagccccagcgcgcagtccttcgaggagctgcagagccagcgcatcctggccaacgtgcgcgagcgccagcgcacccagtcgctcaacgaggccttcgcggcgctgcgcaagatcatccccacgctgccctctgacaagctgagcaagatccagacgctcaagctggccgcca

SEQ ID NO: 11252 - DNA, 201 bp, Artificial Sequence
  Synthetic polynucleotide
ttaagggtgacatctgcgctttaaagggtccgggtcagctgactcccgactctgtggagtctagctgccagggtcgcggcagctgcggggagagatgactggggagcgacccagcacggcgctcccggacagacgctgggggccgcggattctgggcttctggggaggctgtagggtttgggtgtttgccgcgatcttcct

SEQ ID NO: 11253 - DNA, 203 bp, Artificial Sequence
  Synthetic polynucleotide
caccgacccacacgtttatctcaggcaggagggagccaaagtttctctgatgtctcctgatcagcttcggaacaagtttccctggataaacacagagggagtggctttggcgtcttatggtgaggcttgcttgcagaggggacagcttttttcctgaagatggagactaaggggtgctacacgttgggagtctcggtactcca

SEQ ID NO: 11254 - DNA, 201 bp, Artificial Sequence
  Synthetic polynucleotide
cgggtgagcacagtggccctggcccggggggccgcgcggggtgcctgccaggggggaggctcctaaggcccaccccggtgttttccccgccagctgccttctgccagagcctgggcgccgccgcccccgaggtccgctgctgtgtggatgccgtgaacttcgtggccgagagcacgagagatcaggaggccaccggcgagg

SEQ ID NO: 11255 - DNA, 201 bp, Artificial Sequence; identical to SEQ ID NO: 10898
  Synthetic polynucleotide

SEQ ID NO: 11256 - DNA, 204 bp, Artificial Sequence
  Synthetic polynucleotide
gaacaccgagctcaggttggaatgatctaaggacacaaaagcatggggcctcggggctggggcggtgcgactaccggaggcgcaagttgcgcacggggtcccgggagcgatacactgcctccccggtgtcagtgctccagacggtctccgccatgacagctgcgacgcgccgcgactgcgccggaaagcgcgccgctctgtttt

SEQ ID NO: 11257 - DNA, 201 bp, Artificial Sequence
  Synthetic polynucleotide
ctcccgtcacaagctcctgcctctcttttctccccatacaggacgggctctacgagtgcattctctgtgcctgctgtagcaccagctgccccagctactggtggaacggagacaaatatctggggcctgcagttcttatgcaggtgaggtgctccttaattgctttaagagaaattgaaactcaagcatccagaagtccaa

SEQ ID NO: 11258 - DNA, 201 bp, Artificial Sequence
  Synthetic polynucleotide
gcggagtgaatcagctcggtggtgtctttgtcaacgggcggccactgccggactccacccggcagaagattgtagagctagctcacagcggggcccggccgtgcgacatttcccgaattctgcaggtgatcctcccggcgccgccccactcgccgcccccgcggccctccactctcaacgccctctcttcatttcttactg

SEQ ID NO: 11259 - DNA, 201 bp, Artificial Sequence
  Synthetic polynucleotide
tttctgagaagcttcacgaggacaaggctgcagagccgggtgatgccctcgacctaatcattcacagtgcaagggagctgggccatgagccctccatgcaggagctgaaggtaggtgctgacaggccgctccttctcccctcttttgcattcccagcaggtccctacaccaatgctgcatccccagagccacatcttgtgt

SEQ ID NO: 11260 - DNA, 201 bp, Artificial Sequence; identical to SEQ ID NO: 11143
  Synthetic polynucleotide

SEQ ID NO: 11261 - DNA, 201 bp, Artificial Sequence
  Synthetic polynucleotide
ccatctcttcaacaactatgacccaggaagccggccagtgcgggagcctgaggatactgtcaccatcagcctcaaggtcaccctgacgaatctcatctcactggtaagctacccccaccctcatcttaagccaaaaatcccacttctggccccaaccgctgagctctgtcctaaagctcacttctggccctgaaatctcac

SEQ ID NO: 11262 - DNA, 201 bp, Artificial Sequence
  Synthetic polynucleotide
ggccgagcctgcctgcagtgagcgtcccactctgtccctgcaggagatcgtgctggtggtgttcttcgggacggagtacgtggtccgcctctggtccgccggctgccgcagcaagtacgtgggcctctgggggcggctgcgctttgcccggaagcccatttccatcatcggtgagtcatgcctgccctgtggaggtcacgc

SEQ ID NO: 11263 - DNA, 201 bp, Artificial Sequence
  Synthetic polynucleotide
acggagtttgcgtttgaggtagttgtgcctgaccttgccctcatccgcttcttggtggaagattatgatgcctcctccaagaatgacttcattggccagagtaccatccccttgaacagcctcaagcaaggtgagtgtcaagagaaggggatggccaaggtggtgggaagcagggcctggcgtctcttgggctggggctgg

SEQ ID NO: 11264 - DNA, 201 bp, Artificial Sequence
  Synthetic polynucleotide
tgaacagttcagtggaggatgccaagacatcaatgaatgtggctctgcgcaggccccctgcagctatggctgttccaataccgagggcggttacctgtgtggctgtccacctggttacttccgcataggccaagggtaagcagtgctcttcctggtcatggttggagattctttcattcgtaatataattaagtatactga

SEQ ID NO: 11265 - DNA, 207 bp, Artificial Sequence; identical to SEQ ID NO: 11107
  Synthetic polynucleotide

SEQ ID NO: 11266 - DNA, 201 bp, Artificial Sequence
  Synthetic polynucleotide
agacttcgtccaggaatgcgctcaacgtctcccaggcctggcgccatgcgctgccctttgccaagatccgccgcgtgcaggaactgtgcgctggtgcgctgcagctgctgggctaccggcctgtgtactctgaggacgagcagcgcaacctcgcccttgatctggtgctgccacgaggcctgaacggcttcacttgggcat

SEQ ID NO: 11267 - DNA, 201 bp, Artificial Sequence; identical to SEQ ID NO: 10791
  Synthetic polynucleotide

SEQ ID NO: 11268 - DNA, 201 bp, Artificial Sequence
  Synthetic polynucleotide
ttggcaccatatgtgggtggatactaatgaatcctttcttaaccttcccagaacttttggagaaatcaatcagtagaaggcgggacaccgaagccatacagaaagccaaaatcctttattcatcctgcatgaatgagagtgagtgatgaagaaaactaaataaaatatttaccatccctatcctttagagttctattaatg

SEQ ID NO: 11269 - DNA, 201 bp, Artificial Sequence
  Synthetic polynucleotide
gcgctaacgcctgcccttgctctgcccctgcccttctccccagtgggccccaccatcctgaataagattgaagcggctctgaccaaccagaacctgtctgtggatgtggtggaccagtgcctcgtctgcctcaaggaggagtggatgaagtaagcaacagtgtgggtgaggcccctttgcttgcgaccctggagaaaacct

SEQ ID NO: 11270 - DNA, 212 bp, Artificial Sequence
  Synthetic polynucleotide
aaccagcccctgggagcagctgccctgtcccccagggcccagggctgcctcacctccaaagtaggagccgtcggccagcttggtctccttgttgcccttggtgagcacgctgaccacgccatgctggatgaagtacatcttcttgccaatggtgccttcccggatgatgtagtccccaggctggaagacctcgaaacgcagcttggtcagca

SEQ ID NO: 11271 - DNA, 201 bp, Artificial Sequence
  Synthetic polynucleotide
gtagcccctgctcggccttcgagttccactgcctaagtggcgagtgcatccactccagctggcgctgtgatggtggccccgactgcaaggacaaatctgacgaggaaaactgcggtatgggcggggccagggtgggggcggggcgtcctatcacctgtccctgggctcccccaggtgtgggacatgcagtgatttaggtgc

SEQ ID NO: 11272 - DNA, 201 bp, Artificial Sequence
  Synthetic polynucleotide
tcttatcagaaaggatacattgttttaattgttcctcattatatagaatgagagaacatcatttctctccttttcctcccaggtggccgtcgaggaccgagtcaggcagctgcatgaagcccacagggactttggtccagcatctcagcactttctttccagtaagtcattttcagcttttatcacttaactttattgcat

SEQ ID NO: 11273 - DNA, 201 bp, Artificial Sequence
  Synthetic polynucleotide
ttctccatgctggctgctggggtcatgcacgcagtagccacggcctgcagcctgggcaagctggtgagctgtggctgtggctggaagggcagtggtgagcaggatcggctgagggccaaactgctgcagctgcaggcactgtcccgaggcaagagtttcccccactctctgcccagccctggccctggctcaagccccagc

SEQ ID NO: 11274 - DNA, 203 bp, Artificial Sequence
  Synthetic polynucleotide
cctgcctgcagcagcgccgcgggagcgagggagccagggctgcgggtgtggcggggcccctgcccgggcgggcgaagggaacagctgcctgctcttcctgggtttctttggcctctcgctggccctccacctgctgacgttgtgctgctacctagagttgcgctcggagttgcggcgggaacgtggagccgagtcccgccttg

SEQ ID NO: 11275 - DNA, 204 bp, Artificial Sequence; identical to SEQ ID NO: 11079
  Synthetic polynucleotide

SEQ ID NO: 11276 - DNA, 201 bp, Artificial Sequence
  Synthetic polynucleotide
aaccatttcataacagggaccaaagaattgaaccccgatccggttcacagaaaaataaactgctcacccgtctccacctgtcagtttcagggagaccttgcatcaccatggggagtgtgataccagatggggccaaatgggatgatgactgtaatacctgccagtgcctgaatggacggatcgcctgctcaaaggtaggac

SEQ ID NO: 11277 - DNA, 201 bp, Artificial Sequence; identical to SEQ ID NO: 11171
  Synthetic polynucleotide

SEQ ID NO: 11278 - DNA, 201 bp, Artificial Sequence; identical to SEQ ID NO: 10742
  Synthetic polynucleotide

SEQ ID NO: 11279 - DNA, 201 bp, Artificial Sequence
  Synthetic polynucleotide
gctcactctccatggtgtctgagtgcctgttctcgctcatcaatggggacgacatgtttgtgacgttcgccgccatgcaggcgcagcagggccgcagcagcctggtgtggctcttctcccagctctacctttactccttcatcagcctcttcatctacatggtgctcagcctcttcatcgcgctcatcaccggcgcctacg

SEQ ID NO: 11280 - DNA, 201 bp, Artificial Sequence
  Synthetic polynucleotide
cataatttcattgagcgcaaatatatctgaaacttctagcaataaaactagtagtgcagatacccaaaaagtggccattattgaacttacagatgggtggtatgctgttaaggcccagttagatcctcccctcttagctgtcttaaagaatggcagactgacagttggtcagaagattattcttcatggagcagaactggt

SEQ ID NO: 11281 - DNA, 201 bp, Artificial Sequence
  Synthetic polynucleotide
gggtgcttcaggggtgtctgcaaaggagctctgcttcacagcagtgttcccttcttttaggggtctagcccagcagctggtggacccagcccggccaggagatttcaaccaagcagccatggagctaggggccacagtgtgtaccccacagcgcccactgtgcagccagtgccctgtggagagcctgtgccgggcacgcca

SEQ ID NO: 11282 - DNA, 201 bp, Artificial Sequence
  Synthetic polynucleotide
cgtgctcccggctacctttgtgtttttggctctgatgctttctattgttatccctccttttggcgaataccccgctttgacccttcacccctggatatatgggcagcagtacaccttcttcaggtgcgcggactcggggtcaccattctcctctgtgggtttggggcacctgggtcacatgctgcttagaagggccctgac

SEQ ID NO: 11283 - DNA, 201 bp, Artificial Sequence
  Synthetic polynucleotide
ccagaactcagtttagatactgggacactggagaaaaagtcaggagcttgtgaagatcatagtatggctcaagctggtgaagtcgtgctgaagatgaaagtggaagggatgacctgccattcatgtactagcactattgaaggaaaaattgggaaactgcaaggtgttcagcgaattaaaggtaatgtgtctggtgttgat

SEQ ID NO: 11284 - DNA, 201 bp, Artificial Sequence; identical to SEQ ID NO: 11233
  Synthetic polynucleotide

SEQ ID NO: 11285 - DNA, 203 bp, Artificial Sequence
  Synthetic polynucleotide
gttacggctgtctccacccctcagggctaaggtgccctgaggcagagggccaagtcactcacctggactgctgcagacagtgcaagcggaaggtgacagtgcctgtggtctctgtgcggagtccaaagcggctcaggcgttccccctgtggcatgccattgggacagcctcaggtttctgctctctctagacacccccgcacc

SEQ ID NO: 11286 - DNA, 203 bp, Artificial Sequence
  Synthetic polynucleotide
ctgaccccccgcgcgcgaggcagcgatgacgtgggccctgccctcccacgccccattccccttccctgaggccaccgccccctccttgcaggtccagcaaccacggcatcagcctgcaggagatcccacccgagcggcgacggaagctggagaaggcgcggccgggccagttctcttgagaagtgaggcccggccccggacag

SEQ ID NO: 11287 - DNA, 201 bp, Artificial Sequence
  Synthetic polynucleotide
ggcggggggccccgggcgcggctgcgggccctgcgagcccccctgcctctgcggcccagcgcccggcgccgcctgccgcgtcaactgctcgggccgcgggctgcggacgctcggtcccgcgctgcgcatccccgcggacgccacagcgctgtgagtagcgggcccagcggcacccgggagaggccgcgggacgggcgggcg

SEQ ID NO: 11288 - DNA, 201 bp, Artificial Sequence
  Synthetic polynucleotide
ggaagcagagtcattgtgaccagaggggtttgtgtggctgaagaggcaggaggaacagtgtatccacagcgtgggaccatgccaggcacaaaacggtttcaacatgtcattgagaccccggagcctggcaagtgggaggtgagaccccttcttcatgttggctttctgtgctgattcctagaattatttttcatccagtct

SEQ ID NO: 11289 - DNA, 212 bp, Artificial Sequence; identical to SEQ ID NO: 11101
  Synthetic polynucleotide

SEQ ID NO: 11290 - DNA, 201 bp, Artificial Sequence
  Synthetic polynucleotide
acctgggagaagacgcccgcttccgcatgttcagcaagcagggagtgttgactctggagattagaaagccctgcccctttgacgggggcatctatgtctgcagggccaccaacttacagggcgaggcacggtgtgagtgccgcctggaggtgcgaggtgaggagccctcggggccagggcctgggagatgggaagagcggg

SEQ ID NO: 11291 - DNA, 201 bp, Artificial Sequence
  Synthetic polynucleotide
agatttttctccctccagacgtgccgggcctgcagtgcgtgaagtacattcagggactccagtggggaactcagcaaatactcagtgaacacaccaggatgacgcaccaagggccccatgacagattcatcgaacttaatagtacccttttcctgctgagattcatcaatgccaatgtcattgctgaactgttcttcaggc

SEQ ID NO: 11292 - DNA, 204 bp, Artificial Sequence
  Synthetic polynucleotide
ttctcagttttgtacccattaattaaaacaaattatcttcatcaatttattcagcgaataggtcatggtgataaaaaccacaccgatgctgaccgttctcctatttttctccagtttattgattgtgtgtggcaaatgtcaaaacaggtaaggaatatgagggatgaaaatacattcaactcattgtttaaattaaacatttta

SEQ ID NO: 11293 - DNA, 208 bp, Artificial Sequence
  Synthetic polynucleotide
ccaggcgcccggcggggcagcgcgggcctggccaagaagtgccccttctcgctggagctggcggagggcggcccggcgggcggcgcgctctacgcgcccatcgcgcccggcgccccaggtcccgcgccccctgcgtccccggccgcgcccgccgcgcccccagttgcctccgaccttggcccgcggccgccggtgagcctagacccgc

SEQ ID NO: 11294 - DNA, 202 bp, Artificial Sequence
  Synthetic polynucleotide
cctgtgtgattgctgttttaagttcgataccttgtctccaatccactctaagatgtcagcacactcctgtacatactgctggaacttcagggcccgcagcaactggtcacccttctccagggtcagctctaacagcaggtcccacaggtggcgtagctcctctatatgggcctttaggaaagaggggcaaaaccactcagcc

SEQ ID NO: 11295 - DNA, 208 bp, Artificial Sequence
  Synthetic polynucleotide
gaggacctgggggccgccatggaggaggccctcatcctggacaacaagtacacggagcacagcaccgtgggcctcgcccagcagtgggaccagctggaccagctgggcatgcgcatgcagcacaacctggagcagcagatccaggccaggtacccgggagggctgtgggccaggctcagcccagagcagggggaggaaaagacacagt

SEQ ID NO: 11296 - DNA, 214 bp, Artificial Sequence
  Synthetic polynucleotide
gcccttcttattcttctcgtagaacgggaacttcgcgatgatgtactggtagatgccggacagcgtgagcctcttctccgcgctctcgcggatcgccatggcgatgagcgccacgtacgagtacgggggcttctgcgccgggtccggcttctccggggctgtcccgccgccacccccaccgcccttgcctgggctcggcggcggcccttctggc

SEQ ID NO: 11297 - DNA, 201 bp, Artificial Sequence
  Synthetic polynucleotide
ccttcttctccctcttcttcctcttcactctgctctcttctcttcttttcccctttcctctcctctccctttcctcaggtcacagcggagtgaatcagctcggtggtgtctttgtcaacgggcggccactgccggactccacccggcagaagattgtagagctagctcacagcggggcccggccgtgcgacatttcccgaa

SEQ ID NO: 11298 - DNA, 201 bp, Artificial Sequence
  Synthetic polynucleotide
ccagcagctcctacaccggcggcccctgcaccagccccctcctggcccctgtcatcttctgtcccttcccagaaaacctaccagggcagctacggtttccgtctgggcttcttgcattctgggacagccaagtctgtgacttgcacggtcagttgccctgaggggctggcttccatgagacttcaatgcctggccgtatcc

SEQ ID NO: 11299 - DNA, 201 bp, Artificial Sequence; identical to SEQ ID NO: 11279
  Synthetic polynucleotide

SEQ ID NO: 11300 - DNA, 201 bp, Artificial Sequence
  Synthetic polynucleotide
catcctgttcatccgggccgctcgccgcgtgcattcaggcacttaccaggtgacggtgcgcattgagaacatggaggacaaggccacgctggtgctgcaggttgttggtgcgtggccaaggcctccttgagcccccttgtttcccttccctgggctgggctgctggggccaagggtggggccaggggacccaacccacagc

SEQ ID NO: 11301 - DNA, 201 bp, Artificial Sequence
  Synthetic polynucleotide
gactttgaaacatgctcttaatatttggtgcaggacatttcaaagctgagccctcttgcattgcctttttcagatgacctcaagcagtttggcctaacaaccagtattccgttccgaggttgcatcagatccctgaagctcaccaaaggcacaggcaagccactggaggttaattttgccaaggccctggaactgaggggc

SEQ ID NO: 11302 - DNA, 201 bp, Artificial Sequence
  Synthetic polynucleotide
attccaaaagctgccattacaacatctctgtagacccatttccttttgagcacttcagagggggaggaggagtttgtgatgattgtgagcataacactacaggtaagtagcaaataaattcctgagttggtttggaggcctgtgtgcttctatctacaatgcatattattttaaattatgttattgctatcttatttaagg

SEQ ID NO: 11303 - DNA, 202 bp, Artificial Sequence
  Synthetic polynucleotide
ttccttaaagaagtaatgctgatccaggcttttttctttttctgtgactctttgacacgtaataatattgacttttctttctttccagacactacaacaacaggagtgcaaacttctctacagccgaaaagagggtcaaaggcaagaaaacaaaaacaaaaatagatataaaaacatcctgccctgtaagtatcaatattcc

SEQ ID NO: 11304 - DNA, 201 bp, Artificial Sequence
  Synthetic polynucleotide
accgagccacatgtcttcgatctacaaagttcaccatctataacaacatgttctgtgctggcttccatgaaggaggtagagattcatgtcaaggagatagtgggggaccccatgttactgaagtggaagggaccagtttcttaactggaattattagctggggtgaagagtgtgcaatgaaaggcaaatatggaatatata

SEQ ID NO: 11305 - DNA, 201 bp, Artificial Sequence
  Synthetic polynucleotide
ctgtgtgccctgctccaggtgatggtcctggcgctgatgacggtcgagctgttcggcatgatgggcctcatcggaatcaagctcagtgccgtgcccgtggtcatcctgatcgcttctgttggcataggagtggagttcaccgttcacgttgctttggtatgggagacatttgaagcaaaaactttgtgaaaaaacaaccca

SEQ ID NO: 11306 - DNA, 201 bp, Artificial Sequence
  Synthetic polynucleotide
aaaacctggctggttgggaacaagcttgtcactgtgacgacaagcgtgggaaccgggacccggtcgttactaggcctggactcgggggagctgcagtccggcccggagtcgaggtgactgcaccttcctttcctccgcgcctgccagcctcgacaccggctgtcccgagcccaggcccacgtggcaccctcgtaccagcct

SEQ ID NO: 11307 - DNA, 201 bp, Artificial Sequence; identical to SEQ ID NO: 10907
  Synthetic polynucleotide

SEQ ID NO: 11308 - DNA, 201 bp, Artificial Sequence
  Synthetic polynucleotide
agccattggggaagagcctccccaccaagcctctttctctctcttccagatatcgatgagtgtcaggatcccgacacctgcagccagctctgcgtgaacctggagggtggctacaagtgccagtgtgaggaaggcttccagctggacccccacacgaaggcctgcaaggctgtgggtgagcacgggaaggcggcgggtggg

SEQ ID NO: 11309 - DNA, 211 bp, Artificial Sequence
  Synthetic polynucleotide
gacaaggcgcggctgagccccgacccccggggccgcccctgagccccgcctctccctccccggcagaaacgtccgcgcggtgcgggtggtcctgggagcccataacctctcgcggcgggagcccacccggcaggtgttcgccgtgcagcgcatcttcgaaaacggctacgaccccgtaaacttgctcaacgacatcgtgattctccaggtg

SEQ ID NO: 11310 - DNA, 201 bp, Artificial Sequence; identical to SEQ ID NO: 11094
  Synthetic polynucleotide

SEQ ID NO: 11311 - DNA, 201 bp, Artificial Sequence
  Synthetic polynucleotide
gtgtctccagccgtgagctggtgaagaaggtctccgatgtcatatggaacagcctcagccgctcctacttcaaggatcgggcccacatccagtccctcttcagcttcatcacaggttggagcccagtaggtgggaatcttatccatgacccacttcttcaaaaccctccatggtttacagaacccttttaagaactgtaag

SEQ ID NO: 11312 - DNA, 214 bp, Artificial Sequence
  Synthetic polynucleotide
ctgtgtgcaatgtagggggtcatgaactttgaaggatccactttcttccggatgaccttcctcctctccaccggctttgctgatgctggctgtgccagtgctggctgtgccagagctggtttggaagtttctgattgctcatagtcagatgtccttgttgtcgtagtctcataaatttttgttattgtctgaaaatttgatatgcagttcaaca

SEQ ID NO: 11313 - DNA, 201 bp, Artificial Sequence
  Synthetic polynucleotide
gggcagggatggggcaggaggcaggggcaagatggaggcctgggggaacaaggctgtctcccatctcatctgacttctcttggtttggttgtcagggcccccgtggcctgcctggtgagagaggtcgccctggagcccctggccctgctgtaagtactcctggccccttgggggatccctgagctctggaaggggctcccc

SEQ ID NO: 11314 - DNA, 201 bp, Artificial Sequence
  Synthetic polynucleotide
ctggagtgtcgagtccctcagccttgcaattctggggtggagggaagagtgggcagcccacccacccactttctcctggcagccaacagcatgattgacaggaagccgcgcctgctcttccccaccaactccagcagccacctggtggccttgcaggggcagccattggtcctggagtgcatcgccgagggcttgtgagtc

SEQ ID NO: 11315 - DNA, 202 bp, Artificial Sequence
  Synthetic polynucleotide
atggggagagacagcccttgctgagcagatcccgtccttgccctctcccagggaggacccgtggcgtgtggcgaagatggtcaagtcctacctgcagcagcacaacatcccacagcgggaggtggtcgataccactggcctcaaccagtcccacctgtcccaacacctcaacaagggcactcccatgaagacgcagaagcgg

SEQ ID NO: 11316 - DNA, 201 bp, Artificial Sequence
  Synthetic polynucleotide
gctgtggactgagttacctttgtgtcctgtgttggttccacagggattgtgtgcacactctgcattccagggacacgtggctgaagaaagcaagagtggtgaggcttggagaagtaccctacaaggtaactggagctggggggtccctgtggggagtggtgacacaggcctgtagctgagcgggagagctgggggcagaga

SEQ ID NO: 11317 - DNA, 201 bp, Artificial Sequence
  Synthetic polynucleotide
ctgttatcttctctcctaggctgacacaggcaagaatttagtcacgctccccaatacaactgccactgcaattctgtgcagtgacgagactatctggctggagcctgaagttctcttttcagggcctcgtcaaggtgagatgatctagagaaaacttcacacgggagtgaacaaatgtttctttcaaagagattaagagtt

SEQ ID NO: 11318 - DNA, 201 bp, Artificial Sequence
  Synthetic polynucleotide
atttggggacacgccactgacacagagcatccaggccaatgtgacggtggcccccgagcgcctggtgcccatcattgagggtggctcataccgcgtgtggtcagacacacgggacctggtgctggatgggagcgagtcctacgaccccaacctggaggacggcgaccagacgccgctcagtttccactgggcctgtgtggc

SEQ ID NO: 11319 - DNA, 201 bp, Artificial Sequence
  Synthetic polynucleotide
ccgcaaccacacctacaatacctatatcgggcagggttacatcatccccgggatggaccaggggctgcagggtgcctgcatgggggaacgccggagaattaccatccccccgcacctcgcctatggggagaatggaactggtaggggcgttccccagccaccacctcagctcctcctccgaactgcccattgtgtctaggc

SEQ ID NO: 11320 - DNA, 201 bp, Artificial Sequence
  Synthetic polynucleotide
cgcctggtgcccttctccagccccaggccccccggagagccgccgggtggggagcccctgatggaggactgcgagaagagcagcgacacttgcaaccccctgtcaggtatcccgggcgacgggcgggcgagggaggaccgggcgtggcagcggtggtgcgtctaccccgctcacccagctctgctctctggctgcaggcgc

SEQ ID NO: 11321 - DNA, 201 bp, Artificial Sequence; identical to SEQ ID NO: 11095
  Synthetic polynucleotide

SEQ ID NO: 11322 - DNA, 201 bp, Artificial Sequence
  Synthetic polynucleotide
gggagaagtgggagctggacctggacatcaaggaggtcttcgtccaccccaactacagcaagagcaccaccgacaatgacatcgcactgctgcacctggcccagcccgccaccctctcgcagaccatagtgcccatctgcctcccggacagcggccttgcagagcgcgagctcaatcaggccggccaggagaccctcgtga

SEQ ID NO: 11323 - DNA, 201 bp, Artificial Sequence
  Synthetic polynucleotide
atagtaggggtggagatgccaagggcacccaggagaggctctcggcatcaggaagggcctggcccagagatgcctcccctccctccctgcccccaggagtggttcaccgtcttggagcattaccgccgcacccactgcgtggtgccagagctcatcattggcaatggctactacttccgcgtcttcagccagaatatggtt

SEQ ID NO: 11324 - DNA, 201 bp, Artificial Sequence
  Synthetic polynucleotide
acctggggaacccctagccggcatggacacgactcttgtctacaagcacctgccggctccgccttctgcagccccgctgccagggctggactcctcggccctgcaccccctactgtgtgtgggtcctgagggtcagcaggtgagcggggagtgggggtcagggtgggctcttcaaggagcccaggacctacggggcggatg

SEQ ID NO: 11325 - DNA, 201 bp, Artificial Sequence
  Synthetic polynucleotide
gcctaagtgtcttccccggaggtgagattatctccgcctgtgctggacacctccctttctcctgcagccatggatgccgctctgctcctgaacgtggaaggggtcaagaaaaccattctgcacgggggcacgggcgagctcccaaacttcatcaccggatcccgagtgagtggggcccctccggagcagacagggtccccc

SEQ ID NO: 11326 - DNA, 201 bp, Artificial Sequence
  Synthetic polynucleotide
tatgagtaaccagagtcttattcttcctcatctccaggtctatggattctggggtgccacaactcagactttcggaacagaggcatgaccgccttactgaaggtttctagttgtgacaagaacactggtgattattacgaggacagttatgaagatatttcagcatacttgctgagtaaaaacaatgccattgaaccaaga

SEQ ID NO: 11327 - DNA, 201 bp, Artificial Sequence
  Synthetic polynucleotide
agacagtccccgctacaaccccagccctcccaagactggggctaccgtctgaccctgcaagccccctcaggtgttcaccacatcaagcgccgggacatcgtgctcaagtgggagctgggggagggcgcctttgggaaggtcttccttgctgagtgccacaacctcctgcctgagcaggacaagatgctggtggctgtcaag

SEQ ID NO: 11328 - DNA, 201 bp, Artificial Sequence
  Synthetic polynucleotide
ttttcttattcccacagtgtatcggctagcctatctccggctaaatacactttgtgaacgccttctgtctgagcacccagaattagaacatatcatctggacccttttccagcacaccctgcagaatgagtatgaactcatgagagacaggcatttggaccaagtaagaaaatcaagcacttcaccttctctcctccctac

SEQ ID NO: 11329 - DNA, 201 bp, Artificial Sequence
  Synthetic polynucleotide
gcccgcccattgctgccctactggctgctggtgttcctggctgccctcaatgccctgctgcagtggctgctgcggccactggtgctctacgcacccctgctgaacccctacacgctggccgtggccaacaccaccttcaccgtcagcaccgacaaggctcagcgccatttcggctatgagcccctgttctcgtgggaggat

SEQ ID NO: 11330 - DNA, 201 bp, Artificial Sequence
  Synthetic polynucleotide
accctttgcaagaaaaacggcttcaaagtctacgtatacccacagcaaaaaggggagaaaatcgccgaaagttaccaaaacattctagcggccatcgagggctccaggttctacacctcggaccccagccaggcgtgcctctttgtcctgagtctggatactttagacagagaccagttgtcacctcagtatgtgcacaat

SEQ ID NO: 11331 - DNA, 201 bp, Artificial Sequence
  Synthetic polynucleotide
aaggtttttgctgacattcagagtgaagaaattttacaacataaccaaaatatgtctggattggagaaagtttctaaaatatcaccttgtgatgttagtttggaaacttcagatatatgtaaatgtagtatagggaagcttcataagtcagtctcatctgcaaatacttgtgggatttttagcacagcaagtggaaaatct

SEQ ID NO: 11332 - DNA, 205 bp, Artificial Sequence
  Synthetic polynucleotide
caggagagtggctcagcagctctggaacctgcagcccccctgccccgccacagtccgcttctggctgaccccgccggctttcccggcgcaggtactacgagaccggcagcatcaagccgggtgtgatcggtggctccaagcccaaagtggcgacgcccaaagtggtggacaagattgctgaatacaaacgacagaacccgactat

SEQ ID NO: 11333 - DNA, 208 bp, Artificial Sequence; identical to SEQ ID NO: 10975
  Synthetic polynucleotide

SEQ ID NO: 11334 - DNA, 201 bp, Artificial Sequence; identical to SEQ ID NO: 10782
  Synthetic polynucleotide

SEQ ID NO: 11335 - DNA, 205 bp, Artificial Sequence
  Synthetic polynucleotide
ttctcgccctgcaggacggggaggtttactgcatcgacgcgcggttctacgggaacgtcagccggttcatcaaccaccactgcgagcccaacctggtgcccgtgcgcgtgttcatggcccaccaggacctgcggttcccccggatcgccttcttcagcacccgcctgatcgaggccggcgagcagctcgggtacgcaccgccccg

SEQ ID NO: 11336 - DNA, 201 bp, Artificial Sequence
  Synthetic polynucleotide
cctggcctctggaaagtccatgccccatcctcctgcagccctgcccttccctccccatctcgctcattcccccttctcttctttgaggtgtgcccggccggggcaggcgccctggagcctggcgccccaggcagctgctacctggatgcagggctgcggcggcgcctgcgggaggagtggggcgtgagctgctggaccctg

SEQ ID NO: 11337 - DNA, 201 bp, Artificial Sequence
  Synthetic polynucleotide
gggcgtgtggagcggccccgtggtaatctctcttctaccactttttcatgccttgcagcactttgcccatagggaggaaggggaagtgccccagctcgctgtacatggcctggctggagaccctgtcccaggacctcagacctccagtcatcctgatccgaggaaaccaggaaaacgtgctcaccttttactgccagtaac

SEQ ID NO: 11338 - DNA, 201 bp, Artificial Sequence; identical to SEQ ID NO: 11171
  Synthetic polynucleotide

SEQ ID NO: 11339 - DNA, 201 bp, Artificial Sequence
  Synthetic polynucleotide
tgctactggcgacctgcgagttgtctcaggtaatgtgacctttgcccctggggaaaccattcaaaccttgttgttagaggtcctggctgacgacgttccggagattgaagaggtgagaggactggctagtatagaatgacactgtaaatcataccgtatctatagtgactagaacagatggccattgtaacattttggaga

SEQ ID NO: 11340 - DNA, 201 bp, Artificial Sequence
  Synthetic polynucleotide
aagacggggaggtgggagggggacacgggaggtgagtcccgagctcacggcgtcccccaccgccacagcttaccgcatccacgtgaacttgagcactgtggggattctccgtgctctggactcgggctaccaggtggagctgcgaggccgcacggagctgaaggtgaggcagggccccaacccctcccggaggccccgccc

SEQ ID NO: 11341 - DNA, 201 bp, Artificial Sequence
  Synthetic polynucleotide
gaggcctgccgctcctacagccacgtggtgctcaaggaggtgcgcttcttcaacctgcaggtgctctacccgctgctcagcgaccccgcgctcaacctacgcatcgtgcacctggtgcgcgacccgcgggccgtgctgcgctcccgggagcagacagccaaggctctggcgcgtgacaacggcatcgtgctgggcaccaac

SEQ ID NO: 11342 - DNA, 201 bp, Artificial Sequence; identical to SEQ ID NO: 11085
  Synthetic polynucleotide

SEQ ID NO: 11343 - DNA, 208 bp, Artificial Sequence
  Synthetic polynucleotide
cagcgcgttcctgctcaggtccagctcccggagctcggccaggccgctgaagagcgcgggctgcaggtaggccagcctgttgcccgccagcaccagctcgcgcaggctgcccaggccgcggaacgccgcatcggggagcaccgccaggctattccagccgaggttgaggtcccagaggctgccgaggccctcgaagagcccgtcctcc

SEQ ID NO: 11344 - DNA, 201 bp, Artificial Sequence
  Synthetic polynucleotide
agcctcggacccggagcccggccctgccgggcgggagaagccccggcccctgcagggcgctagaggggggccaggccgaggtccggctgcgcagaaacgccagctccgcggggaggctgcaggggctggcggggggcgccccggggcagaaggagtgcaggcccttcgaagtgtacctgccctcgggaaagatgcgaccta

SEQ ID NO: 11345 - DNA, 201 bp, Artificial Sequence
  Synthetic polynucleotide
ctactctttgtgcccagctctctgcccgtgctgacagccctgctctgtgccgccacctgatgccagatgggagcctcccagaggcccagagcctgtggccaaggccactgttttgctagggccccagggcccacatttgggaaagttcttgatgtaggaaagggtgaaaaagcccaaatgctgctgtggttcaaccaggca

SEQ ID NO: 11346 - DNA, 201 bp, Artificial Sequence
  Synthetic polynucleotide
gccccgttccttcatttcacgttgagctgtgcagagaaggcaagaaccttctgaagcattttcgattccgtgacttggaagaggatccgtacctccctggtaatccccgtgaactgattgcctatagccagtatccccggccttcagacatccctcagtggaattctgacaagccgagtttaaaagatataaagatcatgg

SEQ ID NO: 11347 - DNA, 201 bp, Artificial Sequence
  Synthetic polynucleotide
accgatctgatgtgtttgaggcctggcggctgctgctcacatctgctccctccctggccaccagccccgccttccgctacgacctgctggacctcactcggcaggcagtgcaggagctggtcagcttgtactatgaggaggcaagaagcgcctacctgagcaaggagctggcctccctgttgagggctggaggcgtcctgg

SEQ ID NO: 11348 - DNA, 201 bp, Artificial Sequence; identical to SEQ ID NO: 11213
  Synthetic polynucleotide

SEQ ID NO: 11349 - DNA, 210 bp, Artificial Sequence; identical to SEQ ID NO: 11104
  Synthetic polynucleotide

SEQ ID NO: 11350 - DNA, 201 bp, Artificial Sequence
  Synthetic polynucleotide
gggtcttactacggagcacatttgcagtgaattgaggaatttgaatattttgaagaatgtttccgctgaatattcaatctacatcgcttgcgagccttccccttcagcgaacaatgaaatacatgtggccattgtaagtataagacccattcacacctcattattcgatggcaaggcagttcggttaaccagtgtctgaat

SEQ ID NO: 11351 - DNA, 201 bp, Artificial Sequence
  Synthetic polynucleotide
agaaacatacatgataataaagtttctggtccgttgtctggcaattcagctaatcatcatgctgataatcctagacatggttcaagtgaggactacctacacatggtgcacaggctaagtagtgacgtatgtaatatattatcattaaggtgataaaatagttctaatatttgtcatataacctagtatttccatttcaaa

SEQ ID NO: 11352 - DNA, 201 bp, Artificial Sequence
  Synthetic polynucleotide
atcttcagcaggctttgttgtgttaagtctcagcacatgttggatgggtggccatccagcggacatctccttcctgttgtttcagatacagccaggctgatgccctgaagtatgtcggcatcgaaagagaaatggaaatcccttgacatctgctacctcctcccccctcctctgaaacagctgccttagcttcaggaacct

SEQ ID NO: 11353 - DNA, 201 bp, Artificial Sequence
  Synthetic polynucleotide
gcgcccggtaatgaatgtggaggatgaggtgggaggagggacggcagccctgcttctcttctgcccagcttcaaggagcggttccatgccagcgtgcgcaggctgacgcccagctgcgagatcaccttcatcgagtcggaggagggcagtggccggggcgcggccctggtctcggcggtggcctgtaagaaggcctgtatg

SEQ ID NO: 11354 - DNA, 201 bp, Artificial Sequence
  Synthetic polynucleotide
ttccacgagggccccagttggctgcccagaacttgggcatcagcctggccaacttgttgctgagcaaaggagccaaaaacatcctggatgttgcacggcagcttaacgatgcccattaactggtttgtggggcacagatgcctgggttgctgctgtccagtgcctacatcccgggcctcagtgccccattctcactgctat

SEQ ID NO: 11355 - DNA, 206 bp, Artificial Sequence
  Synthetic polynucleotide
gtgggtctttcctttgagtgacagttcaatcctgtctcttctgtagtgtctgtcacctgcaaatccggggacttcagctgtgggggccgtgtcaaccgctgcattcctcagttctggaggtgcgatggccaagtggactgcgacaacggctcagacgagcaaggctgtcgtaagtgtggccctgcctttgctattgagcctatctg

SEQ ID NO: 11356 - DNA, 201 bp, Artificial Sequence
  Synthetic polynucleotide
cacgcactaccacgagcacggctccctctacgactttctgcagagacagacgctggagccccatctggctctgaggctagctgtgtccgcggcatgcggcctggcgcacctgcacgtggagatcttcggtacacagggcaaaccagccattgcccaccgcgacttcaagagccgcaatgtgctggtcaagagcaacctgca

SEQ ID NO: 11357 - DNA, 201 bp, Artificial Sequence
  Synthetic polynucleotide
accgaccccggccccatgctggccatccctgccatggccaccaacccccagaacgccgccagccgccggacgcccaacaacccggggaacccatccaatcccggcccccccaagacccccgagaatagccttatcgtcaccaaccccagcggcacccagaccaattcagctaagactgccaggaaacccgaccacaccaca

SEQ ID NO: 11358 - DNA, 201 bp, Artificial Sequence; identical to SEQ ID NO: 11148
  Synthetic polynucleotide

SEQ ID NO: 11359 - DNA, 201 bp, Artificial Sequence
  Synthetic polynucleotide
gggggctttggaggtggtgctggaggaggtgatggtggtattctgactgctaatgagaagagcaccatgcaggaactcaattctcggctggcctcttacttggataaggtgcaggctctagaggaggccaacaacgacctggagaataagatccaggattggtacgacaagaagggacctgctgctatccagaagaactac

SEQ ID NO: 11360 - DNA, 201 bp, Artificial Sequence
  Synthetic polynucleotide
tgatttttctctattgttttcatctttcaggacactaaaggagactcagccatggtcctctcccaaaggttctgaaggataccttgcagccacctatccaactgtcggccagaccagtccccgagccaggaaatccatgagcctggacatggggcaaccttctcaggccaacactaagaagttgcttggttagtttatcta

SEQ ID NO: 11361 - DNA, 201 bp, Artificial Sequence
  Synthetic polynucleotide
gaagagcctccccaccaagcctctttctctctcttccagatatcgatgagtgtcaggatcccgacacctgcagccagctctgcgtgaacctggagggtggctacaagtgccagtgtgaggaaggcttccagctggacccccacacgaaggcctgcaaggctgtgggtgagcacgggaaggcggcgggtgggggcggcctca

SEQ ID NO: 11362 - DNA, 201 bp, Artificial Sequence
  Synthetic polynucleotide
gcggccaaagctggcatgaaccgggtattcctgcagcggctcctgtggctcctgcggctgctgttcccccgggtcctgtgccgggagacggggctgctggccctgcactcggccgccttggtgagccgcaccttcctgtcggtgtatgtggcccgcctggacggaaggctggcccgctgcatcgtccgcaaggacccgcgg

SEQ ID NO: 11363 - DNA, 211 bp, Artificial Sequence
  Synthetic polynucleotide
agagccatgaggcagagcatacgcagcctgtacccagtggtgccgagcctctggcggtgccaagcctcacaccacccccacccacagatccactgtgcgacgagctgtgccgcacggtgatcgcagccgctgtcctcttctccttcatcgtctcggtgctgctgtctgccttctgcatccactgctaccacaagtttgcccacaagccacc

SEQ ID NO: 11364 - DNA, 201 bp, Artificial Sequence
  Synthetic polynucleotide
cgctcctcagtatacctcctgtcactgtcccttcaggactggagccgggcctcgtctttcttggcttcctcctggtggttgggatggggctggctggggccttcctggcccattatgtgaggtgagtagtggaatgaggtaagtaggaagtgagcttgtgccagaaatggaagtctgcagcaaaaacagcaggctgggttc

SEQ ID NO: 11365 - DNA, 201 bp, Artificial Sequence
  Synthetic polynucleotide
tgttctcatcctcttttctatagccaacccaacccgagcaggcggcagagagccgtatccaggctcagcagaagtgatccgggagtccagcagcaccacgggtatggtcgttgggatagtagccgctgccgccctgtgcatccttatcctcctctatgccatgtacaagtacagaaaccgggatgaaggctcataccatgt

SEQ ID NO: 11366 - DNA, 201 bp, Artificial Sequence
  Synthetic polynucleotide
acccgtccccgcccgcagggggcgccctgctctggctcagcggacacgcggggactcaggcccagggcgctgcccgggtggccgcggcgctggacgacggctcggcccttggccgcttcgagcggatgctggcggcgcagggcgtggatcccggtctggcccgagccctgtgctcgggaagtcccgcagaacgccggcagc

SEQ ID NO: 11367 - DNA, 204 bp, Artificial Sequence
  Synthetic polynucleotide
gtggaagtggctctcctgcgccttgcggaaggcgtagcagctctggccgtagtcgcggaaggtctgtagatctagctgcgccacgggctgggccgggccgggcagggggctaccaccccgcgccgcagaggggctctctgcgccgtctgagccggagctgggggactcgaacaggtcgcaaatgccggagtctcccgggagcgg

SEQ ID NO: 11368 - DNA, 207 bp, Artificial Sequence
  Synthetic polynucleotide
cggctttctttttggcctcggcggcagcggctgccaccacactccccggctttcggccccgtttcttgggaatggcctgagggtcggcctcagcttttcgcttcctgccggggcgtttgatcaccatgacctgggtggatgtggtggccccacccccctcagccttgccccctggcgaagtttgaaaaggcatcttgacaaggagct

SEQ ID NO: 11369 - DNA, 208 bp, Artificial Sequence
  Synthetic polynucleotide
cccctcctcacttctgcctcacagtggccaggtcctgtgccagattgtccctctcaacctccagccgggcgctgttggcggtgagttgatcgagccgcagccgcagctctcgcagctcagcctggtagacgtctgccagcttggtgggctccttggcccgcagctggttcagctcagcagccagcgccttgttttgctgttccaggaa

SEQ ID NO: 11370 - DNA, 201 bp, Artificial Sequence
  Synthetic polynucleotide
cttaagaagggacggggccccacgctgcgcacccgcgggtttgctatggcgatgagcagcggcggcagtggtggcggcgtcccggagcaggaggattccgtgctgttccggcgcggcacaggccaggtgaggtcgcagccagtgcagtctccctattagcgctctcagcacccttcttccggcccaactctccttccgcag

SEQ ID NO: 11371 - DNA, 204 bp, Artificial Sequence
  Synthetic polynucleotide
cctgggagctgcgcttctcgtaccgcgcgcgctgcgagccgcctgccgtcgggaccgcgtgcacgcgcctctgccgtccgcgcagcgccccctcgcggtgcggtccgggactgcgcccctgcgcaccgctcgaggacgaatgtgaggcgccgcgtgagtcctgcgttcgaccccaccccgtcccagccggggaccccggcccct

SEQ ID NO: 11372 - DNA, 201 bp, Artificial Sequence
  Synthetic polynucleotide
ccctgaagaagacggcggggaggagtcgggcgccgaggagtccggcccggaagagtccggcccggaggaactgggcgccgaggaggagatggaggccgggcggccgcggcccgtgctgcgctcggtgaactcgcgcgagccctcccaggtcatcttctgcaatcgcagtccgcgcgtcgtgctgcccgtatggctcaactt

SEQ ID NO: 11373 - DNA, 201 bp, Artificial Sequence
  Synthetic polynucleotide
cacgcccacaccacccacctgtgcccacagcaaacctctgaggaagagttgtgcaatctgctcaccaacgtgctgttctcggtgacgtggcgtggcgtggaaggcagcgatgaggctgcctggcgggagcgtggccaggttttctcagtgctcacccagctgggggcctcagccacacttgtgcgcccaccagactgcatc

SEQ ID NO: 11374 - DNA, 201 bp, Artificial Sequence
  Synthetic polynucleotide
gaaagctaaactcacaatcacttctttttcagaaatttggatgaaaactactgccgcaatcctgacggaaaaagggccccatggtgccatacaaccaacagccaagtgcggtgggagtactgtaagataccgtcctgtgactcctccccagtatccacggaacaattggctcccacaggtaagcaagggtatgggagctta

SEQ ID NO: 11375 - DNA, 201 bp, Artificial Sequence
  Synthetic polynucleotide
cacgggaggtgagtcccgagctcacggcgtcccccaccgccacagcttaccgcatccacgtgaacttgagcactgtggggattctccgtgctctggactcgggctaccaggtggagctgcgaggccgcacggagctgaaggtgaggcagggccccaacccctcccggaggccccgccctgtcctgaggcaccgcccatccc

SEQ ID NO: 11376 - DNA, 201 bp, Artificial Sequence
  Synthetic polynucleotide
gcagagggcagaggcctagcaactgcccctccccctgcagcagtggtgcgactatcgcctgcgctgggatccgcgagactacgaaggcctgtgggtgctgagggtgccgtccaccatggtgtggcggccggatatcgtgctggagaacaagtgaggagggggtgcaggcaggggtgtgggggacaaaggacacagggtctg

SEQ ID NO: 11377 - DNA, 201 bp, Artificial Sequence; identical to SEQ ID NO: 10734
  Synthetic polynucleotide

SEQ ID NO: 11378 - DNA, 201 bp, Artificial Sequence
  Synthetic polynucleotide
gtgtggcgaagatggtcaagtcctacctgcagcagcacaacatcccacagcgggaggtggtcgataccactggcctcaaccagtcccacctgtcccaacacctcaacaagggcactcccatgaagacgcagaagcgggccgccctgtacacctggtacgtccgcaagcagcgagaggtggcgcagcgtaagtaatgaccct

SEQ ID NO: 11379 - DNA, 201 bp, Artificial Sequence
  Synthetic polynucleotide
ctcgtaaaggaccgcaatgtggccaccccacgagactactactttgctctggcccataccgtgcgcgaccacctcgtggggcgctggatccgcacgcagcagcactactatgagaaggaccccaaggtgctgctggggagcctggggtgggggtatgggctgaaggcgctgccagggagctggcgatcttgacttaagtgg

SEQ ID NO: 11380 - DNA, 207 bp, Artificial Sequence
  Synthetic polynucleotide
cactggtgggcgcgggcgccgggggcgcggcggtggctgggctggcagggctgagctggcccggcggcggcgcggcggccccgtggtgcggtggggcaggcggcggtgcggcggccgcgtgcagatggtgtgcgtgcggatgcgggtgggggtgcggcggaggcgggggtgcggccggcgggcctcccaggccattgtacgagttca

SEQ ID NO: 11381 - DNA, 201 bp, Artificial Sequence
  Synthetic polynucleotide
ggctttgggcgccttctggcactgcagctggaccagagaggcttccgagtcctggccagctgcctgaccccctccggggccgaggacctgcagcgggtggcctcctcccgcctccacaccaccctgttggatatcactgatccccagagcgtccagcaggcagccaagtgggtggagatgcacgttaaggaagcaggtaag

SEQ ID NO: 11382 - DNA, 201 bp, Artificial Sequence
  Synthetic polynucleotide
ggccgaggcgcacgcccaggcaaaggcacaggcggagcgggaggcgaaggagctgcagcagcgcatgcaggaggaggtggtgcggcgggaggaggcggcggtggacgcgcagcagcagaagcgcagcattcaggaggagctgcagcagctgcggcagagctcggaggcggagatccaggccaaggcccggcaggcagaggc

SEQ ID NO: 11383 - DNA, 201 bp, Artificial Sequence
  Synthetic polynucleotide
tttggcggacatctcattcttacaggtctgctaggtcctaccatccaggctgaggtttatgatacagtggtcattacacttaagaacatggcttcccatcctgtcagtcttcatgctgttggtgtatcctactggaaagcttctgagggtgagtaaaataccctcctattgtcctgtcattctatgaatagaacagtgaga

SEQ ID NO: 11384 - DNA, 201 bp, Artificial Sequence; identical to SEQ ID NO: 10738
  Synthetic polynucleotide

SEQ ID NO: 11385 - DNA, 201 bp, Artificial Sequence
  Synthetic polynucleotide
tcagcttctggggggacagtcggggccgccagtaccaggagctccctcgatgccccgcccccacccccagcctcctcaacatccccctctccagcccgggtcggcggccccggggcgacgtggagagcaggctggatgccctccagcgccagctcaacaggtgagggagtgcaggtggggtgggggggcacgccctggagt

SEQ ID NO: 11386 - DNA, 201 bp, Artificial Sequence
  Synthetic polynucleotide
tctgcttttattttatggttgggataaggctggattattctgagtccaagctaggcccttttgctaatcatgttcatacctcttatcttcctcccacagctcctgggcaacgtgctggtctgtgtgctggcccatcactttggcaaagaattcaccccaccagtgcaggctgcctatcagaaagtggtggctggtgtggct

SEQ ID NO: 11387 - DNA, 201 bp, Artificial Sequence
  Synthetic polynucleotide
tcctccgtgcgcaagcgccgagtggtcatcgtggaccccgagacgggcaaggagatgtcagtgtacgaggcctaccgcaagggcctgattgaccaccagacgtacctggagctgtccgagcaggagtgcgagtgggaggagatcaccatctcctcctcggacggcgtggtcaagtccatgatcatcgaccgccgctccggg

SEQ ID NO: 11388 - DNA, 201 bp, Artificial Sequence
  Synthetic polynucleotide
ccattgaaactgtgatgctcttctaccctgggctgctcctaacctgtgcccttctctgtccagtcccggcagcagagcccatcgagtatgcccagttccctttctacctcaacggcttgcgggacacctcagactttgtggaggcaattgaaaaagtaaggaccatctgcagcaactatacgagcctggggctgtccagtt

SEQ ID NO: 11389 - DNA, 201 bp, Artificial Sequence
  Synthetic polynucleotide
agctgggcgtgtggagcggccccgtggtaatctctcttctaccactttttcatgccttgcagcactttgcccatagggaggaaggggaagtgccccagctcgctgtacatggcctggctggagaccctgtcccaggacctcagacctccagtcatcctgatccgaggaaaccaggaaaacgtgctcaccttttactgccag

SEQ ID NO: 11390 - DNA, 201 bp, Artificial Sequence; identical to SEQ ID NO: 10875
  Synthetic polynucleotide

SEQ ID NO: 11391 - DNA, 201 bp, Artificial Sequence
  Synthetic polynucleotide
tgctccggggttagcaggtgagcctgcgatgcgcgggaagacgttccgctttgaaatgcagcgggatttggtgagtttcccgctgtctccagcggtgcgggtgaagctggtgtctgcggggttccagactgctgaggaactcctagaggtgaaaccctccgagcttagcaaaggtaacgactcctgatggcaagctgaggc

SEQ ID NO: 11392 - DNA, 201 bp, Artificial Sequence
  Synthetic polynucleotide
gagtgcatctccgacttcctggacaagcatcagatgaaacacaagaagctgcccctgggcttcaccttctcctttcctgtgaggcacgaagacatcgataaggtgggccgggtggaggggcagaaggcagatgaggggaggcacaggcaccccagaggaactctgccttcaaatgtagcccccataccatgtgctcagaag

SEQ ID NO: 11393 - DNA, 201 bp, Artificial Sequence
  Synthetic polynucleotide
acctgtcggtggattgtgtgttctgtcctcattgtattgaattgcttgctctctttctcagttaacttaccaagactggttacacctggagctggaaattcaacctgaagctgatgctctttcagatactgaacggtaagtgttgaaaagagctaccctggccaggcatgatggctcacacctataatcccagcactttgg

SEQ ID NO: 11394 - DNA, 201 bp, Artificial Sequence; identical to SEQ ID NO: 11095
  Synthetic polynucleotide

SEQ ID NO: 11395 - DNA, 204 bp, Artificial Sequence
  Synthetic polynucleotide
atgtttattttctttcacatccaatgacaaggccttatctctgtctcacctcacagcccccacctctgctcccaaggacttgacagtcattactagggaagggaagcctcgtgccgtcattgtgagttggcagcctcccttggaagccaatgggaaaattactggtaagcatctccactttctctcccagcatagctctccctt

SEQ ID NO: 11396 - DNA, 201 bp, Artificial Sequence
  Synthetic polynucleotide
gctgcggagagggggagagcaggcagcgggcggcggggagcagcatggagccggcggcggggagcagcatggagccttcggctgactggctggccacggccgcggcccggggtcgggtagaggaggtgcgggcgctgctggaggcgggggcgctgcccaacgcaccgaatagttacggtcggaggccgatccaggtgggta

SEQ ID NO: 11397 - DNA, 201 bp, Artificial Sequence; identical to SEQ ID NO: 11153
  Synthetic polynucleotide

SEQ ID NO: 11398 - DNA, 201 bp, Artificial Sequence
  Synthetic polynucleotide
gggtgggggcgggtggcagggcctcttcctcactcatttcattgtcatctgcattcccccagggcttcagtttccacctggctgcggtcctgctgtccctggcttttatcacttacgtggagcatggtgagtgcagggcccagcccagccgttggatagaaggttggtgggggggctggagacagcctcccctgaggctaa

SEQ ID NO: 11399 - DNA, 208 bp, Artificial Sequence; identical to SEQ ID NO: 10853
  Synthetic polynucleotide

SEQ ID NO: 11400 - DNA, 201 bp, Artificial Sequence
  Synthetic polynucleotide
ggggagcctgggtctcaccctataccacccgcatgcagatcatggacgagatcaaggaaggcatccagtacgtgttccagaccaggaacccactcacactggtcatctctggctcgggacactgtgccctggaggccgccctggtcaatgtgctggagcctggggactccttcctggttggggccaatggcatttgggggc

SEQ ID NO: 11401 - DNA, 201 bp, Artificial Sequence
  Synthetic polynucleotide
tgcggagatgagcgggtccctcggccgagctgcggcggctctgctccgctgggggcgcggcgcgggcggcggtggcctttggggtccgggcgtgcgggcggcgggctcgggcgcgggcggcggcggctcggcggagcagttggacgcgctggtgaagaaggacaaggtggtggtcttcctcaaggggacgccggagcagcc

SEQ ID NO: 11402 - DNA, 201 bp, Artificial Sequence
  Synthetic polynucleotide
tatttttctttgtcagctcgttttgacaggagccattcaagtagcagacaaagtttcttcagggaagagttcagtgcttgtgcattgcagtgacggatgggacaggactgctcagctgacatccttggccatgctgatgttggatagcttctataggagcattgaagggttcgaaatactggtacaaaaagaatggataag

SEQ ID NO: 11403 - DNA, 206 bp, Artificial Sequence
  Synthetic polynucleotide
ccccagcttttaggaaagccatggtcccttgggcagtatacctcctctctccatggcctctttgttcataacgagggtgtattcataaatgcccccaagcacagcctctgtgatgtagtgggtcccaaaatcacggaagagatctctgtattccccgtagctgtactccaggggcagccgcttaactctctgaaggaactcgtaat

SEQ ID NO: 11404 - DNA, 201 bp, Artificial Sequence
  Synthetic polynucleotide
gccttgtgtcgcagacggtgaccagtgcttggtcttgcccttggagcacccgtgcgccagcctgtgctgcgggcacggcacgtgcatcgacggcatcggcagcttcagctgcgactgccgcagcggctgggagggccgcttctgccagcgcggtgagggggagaggtggatgctggcgggcggcggggcggggctggggcc

SEQ ID NO: 11405 - DNA, 201 bp, Artificial Sequence
  Synthetic polynucleotide
gacgtgacggcgtccgcgcttcagggtctgcacatcgcggtccacgagtgtcagcaccagctgcgcgaccagcgctggaactgctccgcgcttgagggcggcggccgcctgccgcaccacagcgccatcctcaagcgcggtgagcctggctgggcgggtcggcgctgccgcggaggctagggggtgggcggcagggcgagg

SEQ ID NO: 11406 - DNA, 201 bp, Artificial Sequence; identical to SEQ ID NO: 11287
  Synthetic polynucleotide

SEQ ID NO: 11407 - DNA, 201 bp, Artificial Sequence
  Synthetic polynucleotide
tgtccaggtaggccccaacagtttctcttgtctggcaggtcttctattactccacgagcatcttcgagaaggcgggggtgcagcagcctgtgtatgccaccattggctccggtatcgtcaacacggccttcactgtcgtgtcggtgagtctttgcttactggcccccccagccaaaccccagggaggaggcagtgccatct

SEQ ID NO: 11408 - DNA, 201 bp, Artificial Sequence
  Synthetic polynucleotide
tttcttaggaagttatccctatgcacctggccacctcccccatcctgtcagaaggagcttcgagaatggaatgccagctgaaaaggggctctgtggacaggatgagaggcctggaccccagcacgccagcccaagtgatcgctcccagcgagacgccgtcaagcagctctgtagtaaagaagagaagaaaaaggaggagaa

SEQ ID NO: 11409 - DNA, 201 bp, Artificial Sequence
  Synthetic polynucleotide
ggcaatttttctttccgagtttatgatttcccaagaataaattaccatgtgccattcatccttcatcccacgcaggctccatcgaagactggtgcccacctacgagagcgcgtccatccgccgattccaggagggacgcgtggacaacatcagatcggccactccagaggcactggcttttgtgagagccgtgactgacca

SEQ ID NO: 11410 - DNA, 211 bp, Artificial Sequence
  Synthetic polynucleotide
ccaaggggacagtagcccctgctcggccttcgagttccactgcctaagtggcgagtgcatccactccagctggcgctgtgatggtggccccgactgcaaggacaaatctgacgaggaaaactgcggtatgggcggggccagggtgggggcggggcgtcctatcacctgtccctgggctcccccaggtgtgggacatgcagtgatttaggtg

SEQ ID NO: 11411 - DNA, 201 bp, Artificial Sequence; identical to SEQ ID NO: 10791
  Synthetic polynucleotide

SEQ ID NO: 11412 - DNA, 201 bp, Artificial Sequence
  Synthetic polynucleotide
ccgggcctcaagagagtgggtgtctccggaggccatgggctacccggaggtggagcgcagggaactcctgcctgcagcagcgccgcgggagcgagggagccagggctgcgggtgtggcggggcccctgcccgggcgggcgaagggaacagctgcctgctcttcctgggtttctttggcctctcgctggccctccacctgct

SEQ ID NO: 11413 - DNA, 201 bp, Artificial Sequence; identical to SEQ ID NO: 10907
  Synthetic polynucleotide

SEQ ID NO: 11414 - DNA, 213 bp, Artificial Sequence; identical to SEQ ID NO: 10774
  Synthetic polynucleotide

SEQ ID NO: 11415 - DNA, 201 bp, Artificial Sequence
  Synthetic polynucleotide
acccccactgagaggggaggccaggctgcccccagctcccccattcaggctctcaactgaaggccaagccccccaagaagccggagagcagcgcagagcagcagcgccttccactcgggaacggtgagcggggcccagtgggagcgcctcccttctccctggccaggggcaaggggtcaggggtcagagcagggcctgccc

SEQ ID NO: 11416 - DNA, 201 bp, Artificial Sequence
  Synthetic polynucleotide
atccacccaggtcatggtgatcaaacgccccggcaggaagcgaaaagctgaggccgaccctcaggccattcccaagaaacggggccgaaagccggggagtgtggtggcagccgctgccgccgaggccaaaaagaaagccgtgaaggagtcttctatccgatctgtgcaggagaccgtactccccatcaagaagcgcaagac

SEQ ID NO: 11417 - DNA, 201 bp, Artificial Sequence
  Synthetic polynucleotide
ttccagccgcgggccttccacgcgctctgcctgggcagcggcgggctccgcttggcgctgggccttctgcagctgctgcccggccgccggcccgcgggccccgggtcccccgcgacgtccccgccggcctcggtccgcatcctgcgcgctgccgctgcctgcgaccttctcggctgcctgggtaagggcgcgcgcggcccg

SEQ ID NO: 11418 - DNA, 203 bp, Artificial Sequence
  Synthetic polynucleotide
tgctggaagccttcaaaaacattacttccagttccccggaaagacatatttttggagaggacagagttgtctctgagcagcctcaagtgggcacacttgaagaaaggaatgacgtcgtggaagcactgacaggcagtgcagcctcgaggctccgcgggggcacttcctccagacgcctctcttccacaccccttccaaaagca

SEQ ID NO: 11419 - DNA, 201 bp, Artificial Sequence
  Synthetic polynucleotide
agatgtgtccattctccatgtcttcatcagacctcactctgcttgtactccctccctcccaggtgcccgcccctgcatccctaaaagcttcggctacagctcggtggtgtgtgtctgcaatgccacatactgtgactcctttgaccccccgacctttcctgcccttggtaccttcagccgctatgagagtacacgcagtgg

SEQ ID NO: 11420 - DNA, 201 bp, Artificial Sequence
  Synthetic polynucleotide
aacagatatgctgtttcattatttgctggttaattccttggtttaatttcctcttttagggtgaaattggagctgttggtaacgctggtcctgctggtcccgccggtccccgtggtgaagtgggtcttccaggcctctccggccccgttggacctcctgtaagtagccactgtctttaaactttattgagtaaaagaaaac

SEQ ID NO: 11421 - DNA, 201 bp, Artificial Sequence
  Synthetic polynucleotide
cagatggtggccgcgctgaagtctcagccggcccagccagtgaacgtggggctggtggactggatcaccctggcccacgaccactacaccatcgccgtccgcaacacccgccttgtgggcaaggaggtcgcggctcttctccggtggctggaggtaccgacctgccccatccttccttcacctcccttccctcctttccct

SEQ ID NO: 11422 - DNA, 201 bp, Artificial Sequence
  Synthetic polynucleotide
gaaggcacagattcgggccaatggcttcaagctggagacagggcccccgatgggggtgcccccgccgccccctcccgcaccggactacgtgctgcctcccagcctgcatgggcctgagcccaagggcctggccgccggtccacctgctgggccactgggcgactttggggccccagcactgcccatggccgtgcccggtgc

SEQ ID NO: 11423 - DNA, 201 bp, Artificial Sequence; identical to SEQ ID NO: 11177
  Synthetic polynucleotide

SEQ ID NO: 11424 - DNA, 201 bp, Artificial Sequence
  Synthetic polynucleotide
gggcacacctttcccaccctgctcaggcaatgtccctttctcctttcagtcgggaggcaagatcagctcggcgctgcatttctgccgggccgtgtgccgccgggccgagagacggtaagagggctggagagagggagagggcccaagggagagggagaggaacaagggggaggggggagggagagggagaggaggacggag

SEQ ID NO: 11425 - DNA, 201 bp, Artificial Sequence; identical to SEQ ID NO: 11143
  Synthetic polynucleotide

SEQ ID NO: 11426 - DNA, 201 bp, Artificial Sequence
  Synthetic polynucleotide
ctggggggacagtcggggccgccagtaccaggagctccctcgatgccccgcccccacccccagcctcctcaacatccccctctccagcccgggtcggcggccccggggcgacgtggagagcaggctggatgccctccagcgccagctcaacaggtgagggagtgcaggtggggtgggggggcacgccctggagtctggtcc

SEQ ID NO: 11427 - DNA, 201 bp, Artificial Sequence; identical to SEQ ID NO: 10873
  Synthetic polynucleotide

SEQ ID NO: 11428 - DNA, 201 bp, Artificial Sequence
  Synthetic polynucleotide
tgaggagtatgtcgcctgcctccctgacaacagctcaggcaccgtggcagcagtgtccttttcagctgcccacgaaggcctgcttcagccagaggcctgcagcgccttctgcttctccaccggccagggcctcgcagccctctcggagcagggctggtgcctgtgtggggcggcccagccctccagtgcctcctttgcctg

SEQ ID NO: 11429 - DNA, 201 bp, Artificial Sequence
  Synthetic polynucleotide
acgcagtgctcccccggcccaggcttcctgaactactacgatgcctgctcggagggtctgcgcgccgccagccccgccctgcggctgggaggccccggcgactccttccacaccccaccgcgatccccgctgagctggggcctcctgcgccactgccacgacggtaccaacttcttcactggggaggcgggcgtgcggctg

SEQ ID NO: 11430 - DNA, 201 bp, Artificial Sequence
  Synthetic polynucleotide
ccctgagcaatggcggctgccagtatctgtgcctccctgccccgcagatcaacccccactcgcccaagtttacctgcgcctgcccggacggcatgctgctggccagggacatgaggagctgcctcacaggtgtggcacacgccttgtttctgcgtcctgtgtcctccaactgccccctcctgagcctctctctgctcatct

SEQ ID NO: 11431 - DNA, 201 bp, Artificial Sequence
  Synthetic polynucleotide
gcttcatcttcactgagttcctggagccggcagccaatgagaccgtgcggcacgggtgtctgcgcctcaaccagcccacccacgtcaacaacggcaactacacgctgctggctgccaaccccttcggccaggcctccgcctccatcatggctgccttcatggacaaccctttcgagttcaaccccgaggaccccatccctg

SEQ ID NO: 11432 - DNA, 201 bp, Artificial Sequence
  Synthetic polynucleotide
atgagaaaactactatgacttctaaattacgaaaaaatgttaaaaagtcataatgtttttcttttcaggacatgtgaacttatatatttgacacaacccagcagttcgtaagtagttcacagaatgttatttttcacttaaaaaaaaagatttttatggaataatctcaaacatcttgatagttagggttagtttgatcga

SEQ ID NO: 11433 - DNA, 201 bp, Artificial Sequence
  Synthetic polynucleotide
gatatattttcacctttccctcccactggcagaaaaccctactcagtcaccatggtgttcacagtatcgcagacagctactgaagtccctaccagagttaagtgcctctgcagagttgtgtatagaagacagaccaatgcctaagttggaaattgagaaggaaattgaattaggtaagtaccattgaactcatgtcctctg

SEQ ID NO: 11434 - DNA, 201 bp, Artificial Sequence
  Synthetic polynucleotide
cgcgctgcgcggcctggccaacctgacgcacgcgcacctggagcgcggccgcatcgaggcggtggcctccagctcgctgcagggcctgcgccgcctgcgctcgctcagcctgcaggccaaccgcgtccgtgccgtgcacgctggcgccttcggggactgtggcgtcctggagcatctgctgctcaacgacaacctgctggc

SEQ ID NO: 11435 - DNA, 201 bp, Artificial Sequence
  Synthetic polynucleotide
ttcctccttcctcttccctcctccctctgcagtttcttagcgaggttgggctgttcatcatgtctggactatttcacgacccaggggctgaccaccatctatcagattgagcattactccatggatgtaagtaactgttagacttttctcaaattttatttcttcatttctttcctctgatgacaaccgccttgtagttca

SEQ ID NO: 11436 - DNA, 203 bp, Artificial Sequence
  Synthetic polynucleotide
accctaatgtaaaagtccccctgcgagtttccagcacggatctgaaaggcattgtaggcaccggggtagacggaggtcgcctggatctggaacacgtcagcgggcacgctccgctccgaggtgatggtcatgtagcggtgcacaatggatgaaggctgctctcgacatagagggttggaggccgggcagagacagcggctaga

SEQ ID NO: 11437 - DNA, 201 bp, Artificial Sequence
  Synthetic polynucleotide
tcttgtgggtgtaaacggctttcaaccccaacctgtccagaggcctctggatcagtttgtgctgcagtcgcacgcatggttcaacgtgtcctccctcccctatgcggtgcccccgctcagcctgccccgaggggaagctcaggtgagtgtggggggatggagcagagaccagtcctgcaggacccattgtcccccagtcag

SEQ ID NO: 11438 - DNA, 201 bp, Artificial Sequence; identical to SEQ ID NO: 10757
  Synthetic polynucleotide

SEQ ID NO: 11439 - DNA, 208 bp, Artificial Sequence
  Synthetic polynucleotide
cgaggcctcctgcccggtgctcacctgtggtcccgccagcttccagtgcaacagctccacctgcatcccccagctgtgggcctgcgacaacgaccccgactgcgaagatggctcggatgagtggccgcagcgctgtaggggtctttacgtgttccaaggggacagtagcccctgctcggccttcgagttccactgcctaagtggcgag

SEQ ID NO: 11440 - DNA, 201 bp, Artificial Sequence
  Synthetic polynucleotide
gggggagtccctggagggcccgggccgcgctgacctcgcgtccctccgcaggagattccccggagcacgctggactcgttcatgcagccgttccagagcacactgtggctgctggtggggctgtcggtgcacgtggtggccgtgatgctgtacctgctggaccgcttcaggtgagcgcgacccggggctcagacacctcca

SEQ ID NO: 11441 - DNA, 201 bp, Artificial Sequence
  Synthetic polynucleotide
cccacaggccctccagtgggtccgctctccctggggctggcgacagtggacatccagaaccctgacatcacgagttcacgataccgtgggctcccagcacctggacctagcccagctgataagaaacgctcagggaagaagaagatcagcaaagctgatattggtgcacccagtggattcaagtgagagccactccccagt

SEQ ID NO: 11442 - DNA, 201 bp, Artificial Sequence
  Synthetic polynucleotide
cttctgcaatcgcagtccgcgcgtcgtgctgcccgtatggctcaacttcgacggcgagccgcagccctacccaacgctgccgcctggcacgggccgccgcatccacagctaccgaggtacgggcccggcgcttaggcccgacccagcagggacgatagcacggtctgaagcccctctaccgccccggggtccattttgcag

SEQ ID NO: 11443 - DNA, 201 bp, Artificial Sequence
  Synthetic polynucleotide
gaacccgccctgcactgctgtctgggcgggtccggggactcagcactcgacccaaaggtgcaggcgcgcgagcacaacccatggctgcgctgggctgcgcgaggctgaggtgggcgctgcgaggggccggccgtggcctctgcccccacggggccagagccaaggccgcgatccctgccgccctcccctcggacaaggcca

SEQ ID NO: 11444 - DNA, 201 bp, Artificial Sequence
  Synthetic polynucleotide
gcacgcgtgcctgcctggcagcccctcacccaggtgctccctgcaggtcctgcctgactacctgaagggactcttcagcagtgtgccggccagccggcccagcgagcagctgctgcagcaggtgtccaagctggcttcactgcagcatcgcgccaaggaccacttctacctgccgagcgtgtgagcatctgccctcctgcc

SEQ ID NO: 11445 - DNA, 201 bp, Artificial Sequence
  Synthetic polynucleotide
cactctggctcccaccttttcggcttcccacccacgccacccaaagaagtgtctcctgaccctagcaccacgggggctgcgtctccagcctcatcttccgcggggggtagtgcagcccgaggagaggacaaggacggcgtcaagtaccaggtgtcactgacggagagcatgaagatggaaagtggcagtcccctgcgccca

SEQ ID NO: 11446 - DNA, 201 bp, Artificial Sequence
  Synthetic polynucleotide
tggactgcaccatgggccgctgtgcctgggagagcctgctcccttttggaggggcgtcctgagcaccccagactcctggcttccccctggcttcccccagggccccaaggacatgctcccacttgtggagggcgagggcccccagaatggggagaggaaggtcaactggctgggcagcaaagagggactgcgctggaagga

SEQ ID NO: 11447 - DNA, 201 bp, Artificial Sequence; identical to SEQ ID NO: 11417
  Synthetic polynucleotide

SEQ ID NO: 11448 - DNA, 201 bp, Artificial Sequence
  Synthetic polynucleotide
tctgagccgcagcaaatgggctccgacgtgcgggacctgaacgcgctgctgcccgccgtcccctccctgggtggcggcggcggctgtgccctgcctgtgagcggcgcggcgcagtgggcgccggtgctggactttgcgcccccgggcgcttcggcttacgggtcgttgggcggccccgcgccgccaccggctccgccgcca

SEQ ID NO: 11449 - DNA, 201 bp, Artificial Sequence
  Synthetic polynucleotide
aacaatacagggatgaatcaaaatttaggccttacaaataatactccaatgaatcagtccgtaccaagataccccaatgctgtaggattcccatcaaacagtggtcaaggactaatgcaccagcagcccatccaccccagtggctcacttaaccaaatgaacacacaaactatgcatccttcacagcctcagggaacttat

SEQ ID NO: 11450 - DNA, 201 bp, Artificial Sequence
  Synthetic polynucleotide
agtggtgaagcccctgctggtgtccaccctcggtgagaagagcgggaaaggactgaagacctgtaagagccctgggcggaaaagcaaggagagcagccccaaggggcgcagcagcagcgcctcctcaccccccaagaaggagcaccaccaccatcaccaccactcagagtccccaaaggcccccgtgccactgctcccacc

SEQ ID NO: 11451 - DNA, 201 bp, Artificial Sequence; identical to SEQ ID NO: 11287
  Synthetic polynucleotide

SEQ ID NO: 11452 - DNA, 201 bp, Artificial Sequence
  Synthetic polynucleotide
ggaatccccaagtagttagtgttgcattgtctgctgccgtccagagcccagaacgcttcctccagcttggcgccaaggtcccaaagggcgcactgctgctcggcccccccggctgtgggaagacgctgctggccaaggcggtggccacggaggctcaggtgcccttcctggcgatggccggcccagagttcgtggaggtca

SEQ ID NO: 11453 - DNA, 201 bp, Artificial Sequence
  Synthetic polynucleotide
tgtgcagccacaaagcagagcctcagatgctagcttccgcctctgtctctagggtccagaaggccctgtcctgacgcctcctctcctcgcaggagtctgactggaaggtgctgaagctggttctgggcaggctgcctgagtccctgcgctataaagtgctcatctttacttccccttgcagtgtggaccagctgtgctctg

SEQ ID NO: 11454 - DNA, 201 bp, Artificial Sequence
  Synthetic polynucleotide
tcaaataggatcatggacttcttggaggagccaatccctggtgtagggacctatgatgatttcaatacaattgattgggtgagagagaagtctcgagaccgggataggcaccgagaggtaagacaaaagatggcacatgggtaagtgttaggaaatacaggggaagaaattgaagatacatattctttctattctttcctt

SEQ ID NO: 11455 - DNA, 205 bp, Artificial Sequence
  Synthetic polynucleotide
gtgtggagaggagatgggaaagttgcgggggacctgggaggcggctgaccccaaggtatgtgcaggactgccaagcggggctgaactttgcagacgaggacgaggcccaggccttccgggccctcgtgcaggagaagatacaaaaaaggaatcagaggcaaagtggaggtgaggaggccacaggggaggaaaggaagttgggcag

SEQ ID NO: 11456 - DNA, 202 bp, Artificial Sequence
  Synthetic polynucleotide
ggacacagctgggaagccagttgggggttgggggagtgccccaggcagggcccacccgtctccctgggctaactcccctgcctcacccatacccccacagtaccctggcgtggcccagagcatcaacagtgatgtcaacaacctcatggccgtgttgaacatgagcaacatgcttccagaaggtctgaggctaggtggttgg

SEQ ID NO: 11457 - DNA, 201 bp, Artificial Sequence
  Synthetic polynucleotide
ctccagtctcaacagcctgaataacttgaacaacctgagtagcccgtcgctgaattccgcggtgccgacgcctgcctgtccttacgcgccgccgactcctccgtatgtttatagggacacgtgtaactcgagcctggccagcctgagactgaaagcaaagcagcactccagcttcggctacgccagcgtgcagaacccggc

SEQ ID NO: 11458 - DNA, 201 bp, Artificial Sequence
  Synthetic polynucleotide
cggcgggggcgacggcgcgggttgtggcggccgcaggccgggccctgcgaggcctcagctaccgcagcctgcggcggcgcgtgcggcggctgcggcggcttacggcccgcgaggcggccaccgcagtggcggcgctgctctgggcagcagtgacgcgcgctggggccgctggcgcgggggcggcggcgggcgcgctgggcc

SEQ ID NO: 11459 - DNA, 201 bp, Artificial Sequence
  Synthetic polynucleotide
aacaacggcggctgttcccacgtctgcaatgaccttaagatcggctacgagtgcctgtgccccgacggcttccagctggtggcccagcgaagatgcgaaggtgatttccgggtgggactgagccctgggccccctctgcgcttcctgacatggcaaccaaacccctcatgcctcagtttccccatctgttaagtgtgcttg

SEQ ID NO: 11460 - DNA, 203 bp, Artificial Sequence
  Synthetic polynucleotide
tccatcatgtatgcgacaaggaggctaaccccatgctcttgttccctcaggtaccctcacatccatcaccaacctcgccacaagcctggcccggaacatggaccggctctcactggatgaggagcactacaaccggcaggaggagtggcggcggcagctccccgagagcctgggcgaggggcttcgacagggcctgtcccggc

SEQ ID NO: 11461 - DNA, 201 bp, Artificial Sequence; identical to SEQ ID NO: 10852
  Synthetic polynucleotide

SEQ ID NO: 11462 - DNA, 201 bp, Artificial Sequence
  Synthetic polynucleotide
cccagatcttcaggtttctgcgatgcagcaccagacagtgctggaactgacagagactggggtggaggcggctgcagcctccgccatctctgtggcccgcaccctgctggtctttgaagtgcagcagcccttcctcttcgtgctctgggaccagcagcacaagttccctgtcttcatggggcgagtatatgaccccagggc

SEQ ID NO: 11463 - DNA, 201 bp, Artificial Sequence
  Synthetic polynucleotide
cgcgggggacgcaagcggcgcagcagcaggcgcagcgcgggcggcggcgcggggcccggcggagccgcgggtgggggcgtcggaggcggcgacgagccgggcagcccggcccagggcaagcgcggcaagaagtctgcgggctgtggcggcggcggcggcgcgggcggcggcggcggcagcagcagcggcggcgggagtccg

SEQ ID NO: 11464 - DNA, 203 bp, Artificial Sequence
  Synthetic polynucleotide
tctccatcccctgctgcgggggaccgcgcaagcgcagtgagtactgcacgttgtcgcgggccagtaacgtcatcagacgtgtgtgtgtccctgcggcgctaagaaggggagactgaggctgaggctggggaacatcgggcagcatgagcggctgcgggctcttcctgcgcaccacggctgcggctcgtgcctgccggggtctg

SEQ ID NO: 11465 - DNA, 201 bp, Artificial Sequence
  Synthetic polynucleotide
gggaagagctgtggcctccgcaacctcctactcacttccgctccgttctcttgcccgccctgcagcggcacccgacctgacagcgttcagcgacccgcgccagttccccgcgctgccctccatctccgacccccgcatgcactatccaggcgccttcacctactccccgacgccggtcacctcgggcatcggcatcggcat

SEQ ID NO: 11466 - DNA, 201 bp, Artificial Sequence
  Synthetic polynucleotide
cccactcctaggtttctggtgagcttcatggttgacgcccggggtggttccatgagaggaagtcgccacaacggcctgcgagtggtgatcccgccacggacgtgcgcagcgcccacccgcatcacctgccgcctggtcaagccccagaagctcagcacgccgcccccactggccgaggaggagggcctggccagcaggatc

SEQ ID NO: 11467 - DNA, 202 bp, Artificial Sequence
  Synthetic polynucleotide
ggtcctgaccttggctggggggcaccccctgggtgtaagtggtggttttcttgagcgtgtactggcgcccgcaggcctcatcctcctccatgatgcccttgctgctgacggagggcacgcaggtgttggcgcccgagtggatacccgagtcgtaggtgtatgtctgctgccactcagtcaccttgataggctgctccatcag

SEQ ID NO: 11468 - DNA, 205 bp, Artificial Sequence
  Synthetic polynucleotide
aggtccctgtcccccggcccccacaccggctcccccaacgccaggagaaaagccattgcctccagggatggggatgaagcctgtccctcctgggccatagccattgccattgccacttggggcaaagccatttcccccagtgcctccaggtctggaaccagcactccctggaattcctcccattggaagtccatccatgcaaagt

SEQ ID NO: 11469 - DNA, 201 bp, Artificial Sequence
  Synthetic polynucleotide
gtgtcttccaggcatgggcatccagtggcgagacctcctgagtcccgtcaacgtggacgacgacttctgcttcgggcaggtgctggggatgctgctgctggactctgtgctctatggcctggtgacctggtacatggaggccgtcttcccagggcagttcggcgtgcctcagccctggtacttcttcatcatggtgagttc

SEQ ID NO: 11470 - DNA, 204 bp, Artificial Sequence
  Synthetic polynucleotide
gaaaagggccccagagggttcccgcctcaaaacctcggaggcaccgtgctgaggagggccgcgggcgggtccactggcccagcgccgcctcacttcctgggcccggcccagcccacgtcaccaaagggaccctcgccggtggccgagcgtggcgggggcccgcacggggtacagaggtcggagtcggtgtctgactctccctcc

SEQ ID NO: 11471 - DNA, 201 bp, Artificial Sequence
  Synthetic polynucleotide
gagccagcgaacccagcgaggaagtgaacaaggcctctggccccagggcctgtccccccagccaccacaccaagctgaagaagacatggctcacacggcactcggagcagtttgaatgtccacgcggctgccctgaggtcgaggagaggccggttgctcggctccgggccctcaaaagggcaggcagccccgaggtccagg

SEQ ID NO: 11472 - DNA, 201 bp, Artificial Sequence
  Synthetic polynucleotide
tacggtagagacccgcggcaccgcgcgcggcttccagcctcccgaaggtggcttcggctgggtggtggtgttcgctgccacctggtgcaacggctccatcttcggcatccataactctgtcgggatcctctactccatgctgctagaggaggaaaaggaaaaaaatcgccaagtggagttccaagcaggtgagtggccccg

SEQ ID NO: 11473 - DNA, 200 bp, Artificial Sequence
  Synthetic polynucleotide
tccgcccccgtagccgccgccggagcttccgccgccggagcttccgcctccgtagccgccgccggaactgccgccgtggccgccgccgtggccgccgccggagcttccgccgccggagcttccgccgccgtagccgccgccgaaacttccgccgccgcgtccgccgcctccggaactaaacggggtgaggtcacattcgg

SEQ ID NO: 11474 - DNA, 201 bp, Artificial Sequence
  Synthetic polynucleotide
gtgataaggtctatgcccaccagatggttcgtacagattcccgggaacagaagcttgatgcatttctgcagcctctgagcaaacccctgtccagtcagccccaggccattgtcacagaggataagacagatatttctagtggcagggctaggcagcaagatgaggagatgcttgaactcccagcccctgctgaagtggctg

SEQ ID NO: 11475 - DNA, 201 bp, Artificial Sequence; identical to SEQ ID NO: 11279
  Synthetic polynucleotide

SEQ ID NO: 11476 - DNA, 205 bp, Artificial Sequence
  Synthetic polynucleotide
tccccatcccctcctcacttctgcctcacagtggccaggtcctgtgccagattgtccctctcaacctccagccgggcgctgttggcggtgagttgatcgagccgcagccgcagctctcgcagctcagcctggtagacgtctgccagcttggtgggctccttggcccgcagctggttcagctcagcagccagcgccttgttttgct

SEQ ID NO: 11477 - DNA, 210 bp, Artificial Sequence
  Synthetic polynucleotide
cgagctcgggctgccgggcacaagcgaactgcaggcccggcgcactggtgggcgcgggcgccgggggcgcggcggtggctgggctggcagggctgagctggcccggcggcggcgcggcggccccgtggtgcggtggggcaggcggcggtgcggcggccgcgtgcagatggtgtgcgtgcggatgcgggtgggggtgcggcggaggcgggg

SEQ ID NO: 11478 - DNA, 201 bp, Artificial Sequence; identical to SEQ ID NO: 11103
  Synthetic polynucleotide

SEQ ID NO: 11479 - DNA, 201 bp, Artificial Sequence
  Synthetic polynucleotide
tgcacaacaaggagctcatggcctccctggcagaaagcagctttgatgtcatgctgacggaccctttccttccttgcagccccatcgtggcccagtacctgtctctgcccactgtattcttcttgcatgcactgccatgcagcctggaatttgaggctacccagtgccccaacccattctcctacgtgcccaggcctctct

SEQ ID NO: 11480 - DNA, 201 bp, Artificial Sequence
  Synthetic polynucleotide
caaggcccagttagacgcagctgtgaccttcggccccagccaggtggcccggggcgaggaccccgccctgcagatctgctgtcatcctggctgcaccccccgcccagcttgctgccattgcccagatccccatgcctgagggcccctcggctggcctgggcatgtgatggctcctcactgggagcctgtgggggaggctca

SEQ ID NO: 11481 - DNA, 201 bp, Artificial Sequence
  Synthetic polynucleotide
agctgcacgcgggcagccggcgagcgacacagacggcctggacagcgtagaggccgccgcgccgccacccatcctcagcagctcggtggagtggagcacttcgggcgagcgctcggccagtgcccgtttccccgccaccggcccgggctccagcgatgacgaggacgacgacgaggacgagcacggtggcgtcttctccca

SEQ ID NO: 11482 - DNA, 201 bp, Artificial Sequence; identical to SEQ ID NO: 10825
  Synthetic polynucleotide

SEQ ID NO: 11483 - DNA, 201 bp, Artificial Sequence
  Synthetic polynucleotide
gtctgcctcctcaaggcccggcagaagatcgccgtcaagatggtgcacgctgacatctccatcaacatgagcaagcacaccacgttctttggggccatcaggctgggtgaagcccctgcatcctagattccccccattttgcctctgtccgtgccccttccctgggtttgggagccaggactcccagaacctctaagtgct

SEQ ID NO: 11484 - DNA, 201 bp, Artificial Sequence
  Synthetic polynucleotide
ttgtatgatattagaattcaggtgcggggcctccccagtttgggcgggactcacactcttttgcccaatagggtgatgttgggagtgcaggactaaagggtgacaaggtgagtgtgggcatggggagggcagggcaggggccagggtgctcccgactcctctgattcctgcctgccccctcagggagactcagctgtgatc

SEQ ID NO: 11485 - DNA, 201 bp, Artificial Sequence
  Synthetic polynucleotide
agtagcaggttttcttttcaggcaagaagacgtcccgtcaccccctgcaccaggacctgcactatttccccttcaggcccagcgatctcatcgtttgcgcctggacggcgatggagcacatcagccggaacaacggctgtctggttgtgctcccaggcacacacaagggctccctgaagccccacgattaccccaagtggg

SEQ ID NO: 11486 - DNA, 201 bp, Artificial Sequence
  Synthetic polynucleotide
gcaagagaaggggaggcggggtaagggaagtaggtggaagattcagccaagctcaaggatggaagtgcagttagggctgggaagggtctaccctcggccgccgtccaagacctaccgaggagctttccagaatctgttccagagcgtgcgcgaagtgatccagaacccgggccccaggcacccagaggccgcgagcgcagc

SEQ ID NO: 11487 - DNA, 208 bp, Artificial Sequence
  Synthetic polynucleotide
cagccccctgtgaccctgcttgtctgccacctgcagatgtggccgaggaggcgggctgccccctgtcctgtgcagtcagcaagagacggctggagtgtgaggagtgtggcggcctgggctccccaacaggcaggtgtgagtggaggcaaggagatggcaaaggtaagccctggaaacgcccaagggaggcctgcaggggcgatggcac

SEQ ID NO: 11488 - DNA, 201 bp, Artificial Sequence
  Synthetic polynucleotide
agtgacaggcctcacccccacaggcctggctgtgatgcactcacagggcagcgattacctggacatcggcaacaacccgagagtgggcaccaagcggtacatggcacccgaggtgctggacgagcagatccgcacggactgctttgagtcctacaagtggactgacatctgggcctttggcctggtgctgtgggagattgc

SEQ ID NO: 11489 - DNA, 201 bp, Artificial Sequence
  Synthetic polynucleotide
ctgtggccctgagcaatggcctggtgctggcggccctagctcggcggggccggcggggccactgggcacccatacacgtcttcattggccacttgtgcctggccgacctggccgtggctctgttccaagtgctgccccagctggcctggaaggccaccgaccgcttccgtgggccagatgccctgtgtcgggccgtgaagt

SEQ ID NO: 11490 - DNA, 201 bp, Artificial Sequence
  Synthetic polynucleotide
cacagagtttgctagccctggagctgcctccatccctgttcccaggcccagagaaatcccagttggtttctggggaggccacggtggctgagctggatggactggagccagatactgagtatacggtgcatgtgagggcccatgtggctggcgtggatgggccccctgcctctgtggttgtgaggactggtgagtggaccc

SEQ ID NO: 11491 - DNA, 202 bp, Artificial Sequence
  Synthetic polynucleotide
gtgatgacgatggacagggtgacgaagatcatggtgaacagcaggtactcgccgatgagtgggatgaccagtgaggtggacgggatgatctcggtgatgagcagcaggaagacggtgagcgacagcagcacggagatgcacagcgtgatcttctcgccacactcggagggcaggtagaagaccagcacggtgaggcaggaga

SEQ ID NO: 11492 - DNA, 201 bp, Artificial Sequence
  Synthetic polynucleotide
tgacttttcccttgcttctctttttcaccttcccacagtgtccactcccctcggccagggccgcgtcaaccagctcggcggtgtttttatcaacggcaggccgctgcccaaccacatccgccacaagatcgtggagatggcccaccacggcatccggccctgcgtcatctcgcgccagctgcgcgtgtcccacggctgcgt

SEQ ID NO: 11493 - DNA, 201 bp, Artificial Sequence
  Synthetic polynucleotide
cgaggcccaggaggtggggcagcttctgcagcagcacatggagtgcgccattgggcaggcgctgctggtgcatgcacggaatgcagccaccaagagccgggccaaggacagggatgacttcaaggtatgcactgacctctgtccctggggacaccgagggcaagaatgttcagggtagggtccatgcctgggtctgctcct

SEQ ID NO: 11494 - DNA, 201 bp, Artificial Sequence
  Synthetic polynucleotide
cccctcctccaccctcgccccctcctctctgttctcctcccctctctgaggcccattctctgtttcccacagacacggagcagccaggggaggtgtcggccttggggccgggccgggcgggggcagggccgagtagccggggccggccgggggggccgtggggggagagcccgtccagtggcccctccagccctgagagca

SEQ ID NO: 11495 - DNA, 201 bp, Artificial Sequence
  Synthetic polynucleotide
acccaaattcttggagttgatgttgactgtggaattctaatgtgcttggctcttagggtatgactggtttccctggtgctgctggacggactggtcccccaggaccctctgtaagtaaatcactgtaaacgtgtcttcatttactctagccaaaaggcctggcttctgataggaaactggtaagaaactcttcatgaaaac

SEQ ID NO: 11496 - DNA, 201 bp, Artificial Sequence
  Synthetic polynucleotide
cagtgtcctcatgccaacccctttcccccagtgtgggtctcagaggtcatgctgcagcagacccaggttgccactgtgatcaactactataccggatggatgcaggtgactccaggggaggaagggaagggtcatgggtcagaccccagatgagagcctctactttggggtgggtgtagagaaggcttcctctaccacctt

SEQ ID NO: 11497 - DNA, 201 bp, Artificial Sequence; identical to SEQ ID NO: 11030
  Synthetic polynucleotide

SEQ ID NO: 11498 - DNA, 201 bp, Artificial Sequence
  Synthetic polynucleotide
cggccccgggacagcgggcggctggacaaagcgtcgcccgactcacgccatagccccgccaccatctcgtccagcactcgcggcctgggcgcggaggagcgcaggagcccggttcgcgagggcacagcgccggccaaggtggaagaggcgcgcgcgctcccgggcaaggaggccttcgcgccgctcacggtgcagacggac

SEQ ID NO: 11499 - DNA, 201 bp, Artificial Sequence; identical to SEQ ID NO: 11233
  Synthetic polynucleotide

SEQ ID NO: 11500 - DNA, 201 bp, Artificial Sequence
  Synthetic polynucleotide
gcacgggccgcgcacgcagcgccgcgctgccgcgcagatcgcgcaggcactgctgggcgccgaggagcgcaaagtggaaatcgccttctaccggaaagatggtaggagcgggccggggcggggccacgaccaggggcggggtcaagaggggcgggaccacggcgaggggcagggtgcgtgggggtgtgggggtgtgggggc

SEQ ID NO: 11501 - DNA, 201 bp, Artificial Sequence
  Synthetic polynucleotide
gagccgcgtttctttcctcactggcaggagacctgacaccacccgcctgtacgacttcaactcctactggagggtgcacgctggaaacttctccaccatcccccagtacttcaaggagaatggctatgtgaccatgtcggtgggaaaagtctttcaccctggtactgctccatgtccagagtctgggttctcttggtttgt

SEQ ID NO: 11502 - DNA, 201 bp, Artificial Sequence
  Synthetic polynucleotide
atactgtctgtccccacaggtggtctccgtgggcatcaaagacgtgtttgacttcatcccaggctcagaccagctcaatgtcatttcttgccaaggcctggcaccatcccagggccggcccggcctctcgctggtcaaggagaactatgcagagctgctggaggatgccttcctgaagaatgtcaccgcccagatctgcat

SEQ ID NO: 11503 - DNA, 203 bp, Artificial Sequence
  Synthetic polynucleotide
gctcctagagaccacagccccccctcacagggcagccccggcaacagtgcggccagggactcaggcggccagacgtccgccgggtgtccctctggctggctgggcacgagacggcggggcctggtgatggaggccccccagggcagcgaggccacactgcctggccctgcccctggcgagccctgggaagcaggcggccccca

SEQ ID NO: 11504 - DNA, 201 bp, Artificial Sequence
  Synthetic polynucleotide
ctggtggtcttccgcatcgtgctgacggctgtgggcggcgaggccatctactcggacgagcaggccaagttcacttgcaacacgcggcagccaggctgcgacaacgtctgctatgacgccttcgcgcccctgtcgcacgtgcgcttctgggtcttccagattgtggtcatctccacgccctcggtcatgtacctgggctac

SEQ ID NO: 11505 - DNA, 201 bp, Artificial Sequence
  Synthetic polynucleotide
ctgtctcacacagattccacccccgttttccgttgctccaggatctgcggcggaaagcggcccggctggtggccgccaagtgcacactggcagcccgtgtggacagtttccacgagagcacagaagggaaggtgaggagggaaaggtgaggggcggccgggcgtcttttcctctgggcctggggtgtctctgcagggagac

SEQ ID NO: 11506 - DNA, 201 bp, Artificial Sequence
  Synthetic polynucleotide
ggggtcgttctgggagctgtgatcgggggtgtcctcggggtggtgctgttgctgctgctgcttttctacgtggttcggtactgctggctacgcaggcaggcggccctgcagaggaggctcaggtaaggggcggagcctagctcccctccccctctccccactatcccccatctgggcggagactactccagtgggtgggag

SEQ ID NO: 11507 - DNA, 201 bp, Artificial Sequence
  Synthetic polynucleotide
ggacgcacgggcatggggaccccggggagccagatggcccccgtgagcctgaatgtgccccgacccaaccaggtgagcgggcccgtcatgcccagcatgcctcccgggcagtggcagcaggcgccccttccccagcagcagcccatgccaggcttgcccaggcctgtgatatccatgcaggcccaggcggccgtggctggg

SEQ ID NO: 11508 - DNA, 201 bp, Artificial Sequence
  Synthetic polynucleotide
ggagaggtggtgcccttgggaggtcttgggcaggggtgggatataactggggggcccagctgattccctccccttccactccaggcctggcctccacgcaggcacagagtgtgccggtcatcaacagcatgggcagcagcctgaccaccctgcagcccgtccagttctcccagccgctgcacccctcctaccagcagccgc

SEQ ID NO: 11509 - DNA, 201 bp, Artificial Sequence
  Synthetic polynucleotide
agcaattatagatcagtttggtcagagaataatctctgagcatttcctcgtggaggacagttactttcctgagaacatgtgctcacgtgtgcaatacaggtaaggccccctccacccattagcaagcgaaggtaattttattgacattcctgtgtaattctgttcttcaagtaacatgcaaataaatgccaaaccaaagat

SEQ ID NO: 11510 - DNA, 202 bp, Artificial Sequence
  Synthetic polynucleotide
tgtgccaccagacagcatacctggttccgcaggtcctggcttaggccctggcactggtccagggggacccctccagccagctccatgcccagcacccgtgtcgtgcacagctccttaaccacggctgggacccggaagaaggggtcatttgccagcagctgcctggggcagaaggaaagggaggaaggggacttcgtgcttc

SEQ ID NO: 11511 - DNA, 201 bp, Artificial Sequence
  Synthetic polynucleotide
ccttgcccgctccggggctgctcgcgatccccacgaccacgtgcctctcctctcccgcaggccgcgccaagaccttccgcctgaagctgcccgcgctgctggcgctgacggcccgggagtcgtcggtgcggtcgggcggcgcgggcggcgcgggcgccccgggggccgtggtggtggacgtggacctgacgcccgcggcac

SEQ ID NO: 11512 - DNA, 201 bp, Artificial Sequence
  Synthetic polynucleotide
gggccctaggggattttaagcaggttccaggaaccccccgttcagttcctggtcccccactttctcaaccccacagatgctccgggcccctgcccctgccccagctatggctcctggggctccctcatccagccccagccctatcctggctgtgctgctcttctcttctttgggtaagtggagccactctactctgggagt

SEQ ID NO: 11513 - DNA, 201 bp, Artificial Sequence
  Synthetic polynucleotide
gacatcgagcggctgggccgcttcctctggtcgctgcccgtggcccccggggcgtgcgaggccatcaacaaacacgagtcgatcctgcgcgcgcgcgccgtggtcgccttccacacgggcaacttccgcgacctctaccacatccttgagaaccacaagttcaccaaggagtctcacggcaagctgcaggccatgtggctc

SEQ ID NO: 11514 - DNA, 201 bp, Artificial Sequence
  Synthetic polynucleotide
ggcaccgaaggcgcccgaggcgacgctgggtccgtgctggggctgttcgtgcggctctgatcccggggtgggcagagcggggcttccgggtgggcggcccgtggcactcctgtaccgctgctgcttttgtggtgaagaccacccgcggcagggcagcatcctctacagcttgctcactagctcaaagcaaacgcacgtggc

SEQ ID NO: 11515 - DNA, 201 bp, Artificial Sequence
  Synthetic polynucleotide
cccctgaccagcgcgtcgaccgcggccgcgctcctgagacagcccacacccgccgtggagggcgcagtggcatcgggcgccctggccgacccggccacggcggccgcagacagacgcgcctctagcatagccgcgctgaggctcaaggccaaggagcacgcggcgcagctcacgcagctcaacatcctgccgggcaccagc

SEQ ID NO: 11516 - DNA, 205 bp, Artificial Sequence
  Synthetic polynucleotide
ccagggctcccgcgggcccagccggcaggacgcggcctcccccgctcctccagcccgcggccgcggcggtactcacagacctgttctgcagccgccgccgccgctgccgccatcttcccgcgcccgccgccgccgagctccccgcccgactgtgcccgcccctccgcgaccgcaccctgcgcgcctgcgcttgcgccctggcggg

SEQ ID NO: 11517 - DNA, 201 bp, Artificial Sequence
  Synthetic polynucleotide
ctccccgcagcccgctagacgagccgatggcgcggccccggagagcccgggagccgctgctcgtggcgctgctgccgctggcgtggctggcgcaggcgggcctggcgcgcgcggcgggctctgtgcgcctggcgggcggcctgacgctgggcggcctgttcccggtgcacgcgcggggcgcggcgggccgggcgtgcgggc

SEQ ID NO: 11518 - DNA, 201 bp, Artificial Sequence; identical to SEQ ID NO: 10951
  Synthetic polynucleotide

SEQ ID NO: 11519 - DNA, 201 bp, Artificial Sequence
  Synthetic polynucleotide
cgctgctcatccttgcctctagctgcctattgctcgtggggctttgttgctggcccgccccgatcagaggtgcaatgctgggttttggcaggagctgctggcactgctgaagtgtgtggaggctgagattgcaaactatgaggcgtgcctcaaggaggaggtagagaagaggaagaagttcaaggtgggtgatttctccag

SEQ ID NO: 11520 - DNA, 201 bp, Artificial Sequence
  Synthetic polynucleotide
ccgacccgtgcacgacgctgcccgggagggcttcctggacacgctggtggtgctgcaccgggccggggcgcggctggacgtgcgcgatgcctggggccgtctgcccgtggacctggctgaggagctgggccatcgcgatgtcgcacggtacctgcgcgcggctgcggggggcaccagaggcagtaaccatgcccgcataga

SEQ ID NO: 11521 - DNA, 201 bp, Artificial Sequence
  Synthetic polynucleotide
ctgggcgctatgaggtccgggcagaggtgggcaatggcgtgtccaggcacaacctctcctgcagctttgacgtggtctccccagtggctgggctgcgggtcatctaccctgccccccgcgacggccgcctctacgtgcccaccaacggctcagccttggtgctccaggtggactctggtgccaacgccacggccacggctc

SEQ ID NO: 11522 - DNA, 202 bp, Artificial Sequence
  Synthetic polynucleotide
gggggctgaaggggagtaaaaaagagcccagggaggtggctggggcgggaggaatggatagaggggtgaggagagggagagaaactgacacagaaaagagagaggagagaggtttggggcaggggagagaagccagccagagtgggggcggcaggagatagtggagggggtgggggccaaggtggggccacaggaagagagg

SEQ ID NO: 11523 - DNA, 201 bp, Artificial Sequence; identical to SEQ ID NO: 11480
  Synthetic polynucleotide

SEQ ID NO: 11524 - DNA, 201 bp, Artificial Sequence
  Synthetic polynucleotide
ccaagccccgagggtgacccgcgcttcagcttcctcctccacttctacacagtacccatacccaaaaccggcaccctcagctgcacggtagccctgcgtcccaagaccgggtctcaagaccaggtgagtggggcctgggccggccccagcttcaagtgggagcttccaggtctgtggtttgcaggaagggacatggcagcc

SEQ ID NO: 11525 - DNA, 201 bp, Artificial Sequence
  Synthetic polynucleotide
ccccctcctctctgttctcctcccctctctgaggcccattctctgtttcccacagacacggagcagccaggggaggtgtcggccttggggccgggccgggcgggggcagggccgagtagccggggccggccgggggggccgtggggggagagcccgtccagtggcccctccagccctgagagcagtgaggatgagggccca

SEQ ID NO: 11526 - DNA, 201 bp, Artificial Sequence
  Synthetic polynucleotide
tgatctgcttgaatatggtgaccatgatggtggagacagatgaccaaagtcctgagaaaatcaacatcttggccaagatcaacctgctctttgtggccatcttcacaggcgagtgtattgtcaagctggctgccctgcgccactactacttcaccaacagctggaatatcttcgacttcgtggttgtcatcctctccatcg

SEQ ID NO: 11527 - DNA, 201 bp, Artificial Sequence
  Synthetic polynucleotide
tgcccggggtgcccggcgcggtcctgaccctctgcctctggctggcggcctccagcggctgcctggcggccggccccggcgcggctgctgcgcggcggctggacgagtcgctgtctgccgggagcgtccagcgcgctcgctgcgcctccaggtgcctgagcctgcagatcactcgcatctccgccttcttccagcacttcc

SEQ ID NO: 11528 - DNA, 201 bp, Artificial Sequence
  Synthetic polynucleotide
tattttggacagatatcatcaacgaagccattttcagtgccaaccgcctcacaggttccgatgtcaacttgttggctgaaaacctactgtccccagaggatatggttctcttccacaacctcacccagccaagaggtaagggtgggtcagccccacccccccaaccttgaaacctccttgtggaaactctggaatgttctg

SEQ ID NO: 11529 - DNA, 201 bp, Artificial Sequence
  Synthetic polynucleotide
tccccagatggtgctcctggccaggtgcgaggggcactgcagccaggcgtcacgctccgagcctttggtgtcgttcagcactgtcctcaagcaacccttccgttcctcctgtcactgctgccggccccagacttccaagctgaaggcactgcggctgcgatgctcagggggcatgcgactcactgccacctaccggtacat

SEQ ID NO: 11530 - DNA, 201 bp, Artificial Sequence
  Synthetic polynucleotide
gtgactggctgaggcggcgccagttggccgggcacggggctgctgtaaggccgaggttgcggcggaagcggagaccatgttccgagcggcggctccggggcagctccggcgggcggtgagtccggactgggaaggcgaacccagggacggccccccgtcaacccgccgtccctatggggtcttgcaaagatcactggcccc

SEQ ID NO: 11531 - DNA, 201 bp, Artificial Sequence
  Synthetic polynucleotide
caacgaggagaaggcgcagcgtgaggccaacaaaaagatcgagaagcagctgcagaaggacaagcaggtctaccgggccacgcaccgcctgctgctgctgggtaagggcgggcggggggcgccggccccggcccgggggccctcgaagggcgccccgcaggccgcgcgcgccgagcccgccccccgccccgggcgcgcgct

SEQ ID NO: 11532 - DNA, 201 bp, Artificial Sequence
  Synthetic polynucleotide
gtacctccggggtggcgctggggttggctccatgaccaagatctatgggggacgtcagagaaacggcgtcatgcccagccacttcagccgaggctccaagagtgtggcccgccgggtcctccaagccctggaggggctgaaaatggtggaaaaggaccaagatgggtaagcagggtagggggggctgcattgatggagtag

SEQ ID NO: 11533 - DNA, 201 bp, Artificial Sequence
  Synthetic polynucleotide
tgttcctgaggctcttgccccagctgctgaggatgcacgttcgcccgctggccccggcagctgtgcaggacacccagtcccggctacagaatggctcctcgggatggtcgatcacaactggggaggaggtggccctctgcctgcctcgcagtgaactcctcttccagcagtggcagcggcaagggctggtggcggcagcgc

SEQ ID NO: 11534 - DNA, 201 bp, Artificial Sequence
  Synthetic polynucleotide
gagtgccaggcccccaagggtcatctccacaaaagaatgcagggggcacagccctcatggtcccattgttccccggccaggtgaactgtgtggtgatgcgaggccttaacgaggatgaactcctggactttgcggccttgactgagggcctccccctggatgtgcgcttcatagagtatatgccctttgatggtcagtgac

SEQ ID NO: 11535 - DNA, 201 bp, Artificial Sequence
  Synthetic polynucleotide
acaatggcggctgctcccacctgtgcctgctgtccccaagcgagcctttctacacatgcgcctgccccacgggtgtgcagctgcaggacaacggcaggacgtgtaaggcaggtgaggcggtgggacgggacggggcgggcgggcggggcggggcctggcgggaatgggttgcggccgccgggggtgccccagaaggaacct

SEQ ID NO: 11536 - DNA, 201 bp, Artificial Sequence
  Synthetic polynucleotide
cagtcggggccgccagtaccaggagctccctcgatgccccgcccccacccccagcctcctcaacatccccctctccagcccgggtcggcggccccggggcgacgtggagagcaggctggatgccctccagcgccagctcaacaggtgagggagtgcaggtggggtgggggggcacgccctggagtctggtccaggtcctgg

SEQ ID NO: 11537 - DNA, 201 bp, Artificial Sequence
  Synthetic polynucleotide
gtccccccagcgaacccacccacctggcagtagaggacgtctctgacaccacggtctccctcaagtggcggcccccagagcgcgtgggagcaggaggcctggatggctacagcgtggagtactgcccagagggctgtgagtgtccccgcccccaacccccctccccaaaggaagaacatgctcaccttgccattgagcaga

SEQ ID NO: 11538 - DNA, 201 bp, Artificial Sequence
  Synthetic polynucleotide
tgtctgagaacatgctgtgtgcgggcatcctcggggaccggcaggatgcctgcgagggcgacagtggggggcccatggtcgcctccttccacggcacctggttcctggtgggcctggtgagctggggtgagggctgtgggctccttcacaactacggcgtttacaccaaagtcagccgctacctcgactggatccatgggc

SEQ ID NO: 11539 - DNA, 201 bp, Artificial Sequence
  Synthetic polynucleotide
ccccgcgttccggacgcgggggaacgcgaacaccgtgtgggtggactaccccaatattgtccgggtcgtgccggtggggggccgcatctacattgacgacgggctcatctccctagtggtccagaaaatcggtgcggacgcgcctcccgccctgaccacatccgtgcgctgggcacattcccttctccttggctcccccat

SEQ ID NO: 11540 - DNA, 201 bp, Artificial Sequence
  Synthetic polynucleotide
ggctggcaggcacccacttgccgttggcccccactgtctcctttgcttgcagagctgtccgaggttctgtgggccatggtgatgcgcataggcctgggcctgggccgggaggtgggcgtggcggctgtggtgctggtccccatctttgccgcctttgccgtgatgaccgtggctatcctgctggtgatggagggactctca

SEQ ID NO: 11541 - DNA, 201 bp, Artificial Sequence
  Synthetic polynucleotide
ttgacgagcagagtggaaaggagaagtacaagcttctggtggaaggtgataacctgcgggcagtcatggccacacacggtgtgaagggcacccgaaccacctccaataacacctatgaggtaccactcagcccacggggtcgccttagggttaggctgtcttccttgtgccatctgcaggccttccactgattcccagtat

SEQ ID NO: 11542 - DNA, 201 bp, Artificial Sequence; identical to SEQ ID NO: 11131
  Synthetic polynucleotide

SEQ ID NO: 11543 - DNA, 201 bp, Artificial Sequence
  Synthetic polynucleotide
tcaggtaagtggtggtcaccagtcctctgccctcttcttcagggggccatggtcttcgagttggcgccctggacgtgccggcctcccagttcctgggcagtgccacttctccaggaccacggactgcaccagccgcgaaacctgagaaggcctcagctggcacccgggttcctgtgcaggagaagacgaacctggcggcct

SEQ ID NO: 11544 - DNA, 201 bp, Artificial Sequence
  Synthetic polynucleotide
ctctgtggtatctgaactatcttctctaactgcaggttgggctcagatctgtgatagaacagtttcctgggaagcttgactttgtccttgtggatgggggctgtgtcctaagccatggccacaagcagttgatgtgcttggctagatctgttctcagtaaggcgaagatcttgctgcttgatgaacccagtgctcatttgg

SEQ ID NO: 11545 - DNA, 201 bp, Artificial Sequence
  Synthetic polynucleotide
cagggggatgaggattggtgtccagattcacaacacctggctgaatcctgatgtggtcaccacttacctacgggagaagcaccagatccgagtccgagcccagaggcttccagaagtacaggtctgtgtctctttccagtcccatggagctgaactctggaaggaataaagtcccatgtagcaggagcactgactgggagt

SEQ ID NO: 11546 - DNA, 201 bp, Artificial Sequence
  Synthetic polynucleotide
aacgacatccgcccgtggtgcttcgtgctgaaccgcgaccggctgagctgggagtactgcgacctggcacagtgccagaccccaacccaggcggcgcctccgaccccggtgtcccctaggcttcatgtcccactcatgcccgcgcagccggcaccgccgaagcctcagcccacgacccggaccccgcctcagtcccagacc

SEQ ID NO: 11547 - DNA, 201 bp, Artificial Sequence
  Synthetic polynucleotide
gaactgctccaagggagaaacttctgggagcctccaaactcctagctgtctcatcccttgccctggagagacggcagaaccatggcattttatagctgctgctgggtcctcttggcactcacctggcacacctctgcctacgggccagaccagcgagcccaaaagaagggggacattatccttggggggctctttcctatt

SEQ ID NO: 11548 - DNA, 205 bp, Artificial Sequence
  Synthetic polynucleotide
cggctcctgggacactggatggggcaggcacagcccctcccatcgctgccgtccgtccccccagggcgccgagaccaggaagcgctcgcccacacttagcagccagttcaagcggtcactggagctgctgatgcgcacgctgggtgcctgccagcccttctttgtgcgatgcatcaagcccaatgagttcaagaagcccatggtg

SEQ ID NO: 11549 - DNA, 201 bp, Artificial Sequence
  Synthetic polynucleotide
ggagggccacagggtcacgtggaccggccgcttcaagtacgtccgcgtgactgacatcgacaacagcgccgagtctgccatcaacatgctcccgttcttcatcggcgactggatgcgctgcctctacggcgaggcctaccctgcctgcagccctggcaacacctccacggccgaggaggagctctgtcgccttaagctgct

SEQ ID NO: 11550 - DNA, 201 bp, Artificial Sequence
  Synthetic polynucleotide
catgcttgtggccatgaagtggctgtttgaagagtttgccatagatgggcgcttctgcatcagcatccatgacgaggttcgctacctggtgcgggaggaggaccgctaccgcgctgccctggccttgcagatcaccaacctcttgaccaggtatgcggggcccatggcctctagcctggccatgtgctcctatgtggggct

SEQ ID NO: 11551 - DNA, 201 bp, Artificial Sequence
  Synthetic polynucleotide
agggagctgtagctggatgctccctgctccccacaggcatcgtgaaggcctactacgtgcgtgcccgggctcacgcagaggtgtggaatgaggccgaggccaaggcggacctccagaaagtgctggagctggagccgtccatgcagaaggcggtgcgcagggagctgaggctgctggagaaccgcatggcggagaagcagg

SEQ ID NO: 11552 - DNA, 208 bp, Artificial Sequence; identical to SEQ ID NO: 10853
  Synthetic polynucleotide

SEQ ID NO: 11553 - DNA, 201 bp, Artificial Sequence
  Synthetic polynucleotide
gccctgatgggcagctgggtcgccagattagccacttcttctcggagaatgaggatttccgctgcattgctggcatgtgtgtggatgctcgtggtgatctcatcgtggctgacagtagtcgcaaggaaattctccattttcctaagggtgggggctatagtgtccttattcgagagggacttacctgtccggtgggcatag

SEQ ID NO: 11554 - DNA, 201 bp, Artificial Sequence
  Synthetic polynucleotide
tgttgtgatgcgtattcccgtagatccgagcaccagccggcgcttcagccccccctccagcagcctgcagcccggcaaaatgagcgacgtgagcccggtggtggctgcgcaacagcagcagcaacagcagcagcagcaacagcagcagcagcagcagcaacagcagcagcagcagcaggaggcggcggcggcggctgcggc

SEQ ID NO: 11555 - DNA, 201 bp, Artificial Sequence
  Synthetic polynucleotide
ggcccttctcagctggttccagccagctggcctctgcctaactcactcccctctctcctgacccacagcccagcacggccccacccaagcccaagccgcctccgctgaccaaggagacagtggtgttctgggacatgcgcctgtggcacgtggtgggcatcttttcgctcttcgtgttgtccatcagtgagtagctgttcc

SEQ ID NO: 11556 - DNA, 201 bp, Artificial Sequence
  Synthetic polynucleotide
tttccctcagcctggacccccgcagccccatctcttcagcacacccaccctgggctcctcggcctggcctgatcttctcatcccctaacaggccgcgccgacttcctggagcagccggtgctgggcttcgtgaggctgcaggaggcagcggagctggaggcggtggagctgccggtgcctatacgcttcctctttgtgttg

SEQ ID NO: 11557 - DNA, 201 bp, Artificial Sequence; identical to SEQ ID NO: 11213
  Synthetic polynucleotide

SEQ ID NO: 11558 - DNA, 201 bp, Artificial Sequence
  Synthetic polynucleotide
gttaggtgaagtgattatccaggtgtttgatcacgttaattccctatcttgctgcagaaactcagaggatttcctcatcacaacagcacccacatttacgtaaagtttcagtgtctgaatcaaatgttctcttggatgaagaagtacttactgatccgaagatccaggcgctgcttcttactgttctagtaaggatttccc

SEQ ID NO: 11559 - DNA, 201 bp, Artificial Sequence
  Synthetic polynucleotide
caggaccgcttgcagttcgagactgtggaagtctcggagcccagcatgctgcagaagatcctcaccaccaggcggcgggagaccgggggcaacgagccactgcccgtgcccacgctgcagcaccatttggcaccgccggcggaggccaggaaggtgccctccgcctcccaggtccaagccatcaagtgctttctttccaaa

SEQ ID NO: 11560 - DNA, 201 bp, Artificial Sequence
  Synthetic polynucleotide
tcacgctgcgcctcgagttcccggcggccggccgcgccctggccgccctcagcgtccgcccctttgcgctgcgccgcctcagcgcgggcctctcgctgcctctgctcacctcggtacgcccgtccccggccagaccccgcgcctcccaccggcagcgtcccgccccctcgcggggccccgccccggcagcgtctcacccct

SEQ ID NO: 11561 - DNA, 201 bp, Artificial Sequence
  Synthetic polynucleotide
gcgctgcgcggcctggccaacctgacgcacgcgcacctggagcgcggccgcatcgaggcggtggcctccagctcgctgcagggcctgcgccgcctgcgctcgctcagcctgcaggccaaccgcgtccgtgccgtgcacgctggcgccttcggggactgtggcgtcctggagcatctgctgctcaacgacaacctgctggcc

SEQ ID NO: 11562 - DNA, 201 bp, Artificial Sequence
  Synthetic polynucleotide
ccggcccgacccgaccgcacccggcgcctgccctcgctcggcgtccccggccagccatgggcccttggagccgcagcctctcggcgctgctgctgctgctgcaggtaccccggatcccctgacttgcgagggacgcattcgggccgcaagctccgcgccccagccctgcgccccttcctctcccgtcgtcaccgcttccct

SEQ ID NO: 11563 - DNA, 201 bp, Artificial Sequence
  Synthetic polynucleotide
caggcagaccatgtggaccctggtgagctgggtggccttaacagcagggctggtggctggaacgcggtgcccagatggtcagttctgccctgtggcctgctgcctggaccccggaggagccagctacagctgctgccgtccccttctggtgagtgcccctcagcctaggcaagagctggcagcctgggttttcccaaaggg

SEQ ID NO: 11564 - DNA, 201 bp, Artificial Sequence
  Synthetic polynucleotide
tacgtggttgccctgggagcccacaccggggaggagagcgtggctgaccatcacgaggctgaatattatgtggctgccgtgtatgagcatccatccatcctgagtctgaaccctctggctctcatcagccgccaagaggccttggagctcatgaaccagaaccttgacatctatgaacagcaagtgatgactgcagcccaa

SEQ ID NO: 11565 - DNA, 201 bp, Artificial Sequence
  Synthetic polynucleotide
cccaagcagccacagtccccccgccgcgatggcgctgcaaagccaggcgagcgaggaagcaaaggggccctggcaggaggcagaccaggaacagcaggagccggtgggtagcccagagccggagtctgagccggagcctgagcccgagcccgagcccgtgccagtgcccccgcccgagccccagccggagccccagcccct

SEQ ID NO: 11566 - DNA, 201 bp, Artificial Sequence
  Synthetic polynucleotide
gttctgtgaccccttttcctcatctctgcctgcttcctcacagcttgaggcagccctaggtgaggccaagaagcaacttcaggatgagatgctgcggcgggtggatgctgagaacaggctgcagaccatgaaggaggaactggacttccagaagaacatctacagtgaggtggggactgtgctttgcaagccagagggctg

SEQ ID NO: 11567 - DNA, 201 bp, Artificial Sequence
  Synthetic polynucleotide
gagcctgccgggaggaagctccctggaaaccagcccccgcctcttccaggggtggttggggggaccctccaggcggccaccatctgtgcctccagccaccagtttctctccacacactacaacctgcacaacctctacggcctgaccgaagccatcgcctcccacaggtgagggccacgtcccgccccactgggctctgcc

SEQ ID NO: 11568 - DNA, 201 bp, Artificial Sequence
  Synthetic polynucleotide
tctggggggacagtcggggccgccagtaccaggagctccctcgatgccccgcccccacccccagcctcctcaacatccccctctccagcccgggtcggcggccccggggcgacgtggagagcaggctggatgccctccagcgccagctcaacaggtgagggagtgcaggtggggtgggggggcacgccctggagtctggtc

SEQ ID NO: 11569 - DNA, 201 bp, Artificial Sequence
  Synthetic polynucleotide
ggccaggccccgcggccgacttctccgtgtcggtggagcgcgctctggctgccaagccgggcttggacacctacagcctgggcggcggcggcgcggcgcgcgtgcgggtgcgcggctccacgggcgtggcggccgccgcggggctgcaccgctacctgcgcgacttctgtggctgccacgtggcctggtccggctctcagc

SEQ ID NO: 11570 - DNA, 201 bp, Artificial Sequence
  Synthetic polynucleotide
atggtgattctaggtttgtcagctcctgtgccaaggggaaggaagggaaagaaggtgaaagcccagagcacacagccggtggtgcaggatgccgactggctggccagctgcaacccagatgccctgttccaggaggacagctacaagaaacacctgaagcatcactgtaacaagtatgttattagagggtggacctggaga

SEQ ID NO: 11571 - DNA, 201 bp, Artificial Sequence; identical to SEQ ID NO: 11023
  Synthetic polynucleotide

SEQ ID NO: 11572 - DNA, 201 bp, Artificial Sequence
  Synthetic polynucleotide
tgcagcccggggggtgtccgggctgagcgggctcacccggttgttgtggcgcgcctgctccagagtggcggtgaagaggaagcagcggcaggggacgcccgcggctcgggcacactggacgtacctgtgggggaaggagctggatgtgcaggccccgcccaccccgccgcaggccacctacggccccgcggtcacgctacc

SEQ ID NO: 11573 - DNA, 201 bp, Artificial Sequence
  Synthetic polynucleotide
gtcgtgctcccggcaggcgtggagccgcgataaccccggcttcgaggccgaggaggaggaggaggaggtggaaggggaagaaggcggaatggtggtggagatggacgtagagtggcgcccgggcagccggaggtcggccgcctcctcggccgtgagctccgtgggcgcgcggagccgggggcttgggggctaccacggcgc

SEQ ID NO: 11574 - DNA, 201 bp, Artificial Sequence
  Synthetic polynucleotide
ctaagtggcgagtgcatccactccagctggcgctgtgatggtggccccgactgcaaggacaaatctgacgaggaaaactgcggtatgggcggggccagggtgggggcggggcgtcctatcacctgtccctgggctcccccaggtgtgggacatgcagtgatttaggtgccgaagtggatttccaacaacatgccaagaaag

SEQ ID NO: 11575 - DNA, 201 bp, Artificial Sequence
  Synthetic polynucleotide
cctcctttcttccctctctccaccagagcgatcgcctcaccggcccatcctccaagccggactgccggcaaatgcctccacagtggtcggaggagacgtagagtttgtctgcaaggtttacagtgatgcccagccccacatccagtggatcaagcacgtggaaaagaacggcagtaaatacgggcccgacgggctgcccta

SEQ ID NO: 11576 - DNA, 201 bp, Artificial Sequence
  Synthetic polynucleotide
cacacgcgtgcagagcatggcgctgccccccggcgtagtgaactcgtacaatggcctgggaggcccgccggccgcacccccgcctccgccgcacccccacccgcatccgcacgcacaccatctgcacgcggccgccgcaccgccgcctgccccaccgcaccacggggccgccgcgccgccgccgggccagctcagccctgc

1. A method of selecting a guide RNA for use in a Cas-based genome editing system capable of introducing a genetic change into a nucleotide sequence of a target genomic location, the method comprising:
(i) identifying in an input nucleotide sequence of a target genomic location one or more available cut sites for a Cas-based genome editing system;
(ii) analyzing the input nucleotide sequence and the one or more available cut sites with a computational model to identify a guide RNA capable of introducing the genetic change into the nucleotide sequence of the target genomic location, wherein the computational model comprises a first module configured to compute a microhomology score matrix; a second module configured to compute a microhomology-independent score matrix; and a third module configured to compute a probability distribution over 1-bp insertions, and wherein the computational model computes a probability distribution over indel genotypes and a probability distribution over indel lengths for the given input nucleotide sequence and the one or more available cut sites.

2-6. (canceled)

7. The method of claim 1, wherein the Cas-based genome editing system comprises a type II Cas RNA-guided endonuclease, or a functional variant or orthologue thereof.

8. The method of claim 1, wherein the Cas-based genome editing system comprises a Cas9 RNA-guided endonuclease, or a variant or orthologue thereof.

9. (canceled)

10. The method of claim 84, wherein the Cas9 RNA-guided endonuclease is Streptococcus pyogenes Cas9 (SpCas9), Staphylococcus pyogenes Cas9 (SpCas9), Staphylococcus aureus Cas (SaCas9), Francisella novicida Cas9 (FnCas9), or a functional variant or orthologue thereof.

11. The method of claim 1, wherein the genetic change is to a genetic mutation.

12. The method of claim 11, wherein the genetic mutation is a single-nucleotide polymorphism, a deletion mutation, an insertion mutation, or a microduplication error.

13. The method of claim 1, wherein the genetic change comprises a 2-60-bp deletion or a 1-bp insertion.

14. The method of claim 11, wherein the genetic mutation causes a disease or a risk of a disease.

15. (canceled)

16. The method of claim 14, wherein the disease is sickle cell disease, cystic fibrosis, polycystic kidney disease, Tay-Sachs disease, achondroplasia, beta-thalassemia, Hurler syndrome, severe combined immunodeficiency, hemophilia, glycogen storage disease Ia, or Duchenne muscular dystrophy.

17. (canceled)

18. The method of claim 1, wherein the computational model is a deep learning computational model.

19. The method of claim 1, wherein the computational model is a neural network model having one or more hidden layers.

20. The method of claim 1, wherein the computational model is trained with experimental data to predict the probability of distribution of indel lengths for any given nucleotide sequence and cut site.

21. The method of claim 1, wherein the computational model is trained with experimental data to predict the probability of distribution of genotype frequencies for any given nucleotide sequence and cut site.

22-23. (canceled)

24. The method of claim 1, wherein the computational model predicts genomic repair outcomes for any given input nucleotide sequence and cut site.

25. The method of claim 24, wherein the genomic repair outcomes comprise microhomology deletions, microhomology-less deletions, and 1-bp insertions.

26. The method of claim 1, wherein the first, second, and third module of the computational model each comprises one or more input features selected from the group consisting of: a target site nucleotide sequence; a cut site; a PAM-sequence; microhomology lengths relative at a cut site; % GC content at a cut site; and microhomology deletion lengths at a cut site.

27. The method of claim 1, wherein the nucleotide sequence analyzed by the computational model is between about 25-100 nucleotides.

28. A method of introducing a genetic change in the genome of a cell with a Cas-based genome editing system comprising:
(i) selecting a guide RNA for use in the Cas-based genome editing system in accordance with the method of claim 1; and
(ii) contacting the genome of the cell with the guide RNA and the Cas-based genome editing system, thereby introducing the genetic change.

29-34. (canceled)

35. A method of treating a genetic disease in a subject caused by a genetic error in the genome of one or more cells of the subject, comprising: (i) selecting a guide RNA for use in a Cas-based genome editing system in accordance with the method of claim 1; and
(ii) contacting the genome of the one or more cells of the subject with the guide RNA and the Cas-based genome editing system, thereby correcting the genetic error in the genome of the cell.

36-40. (canceled)

41. A guide RNA identified by the method of claim 1.

42-50. (canceled)

51. A Cas-based genome editing system comprising a Cas protein complexed with a least one guide RNA of claim 41.

52-53. (canceled)

54. A library for training a computational model for selecting a guide RNA sequence for use with a Cas-based genome editing system capable of introducing a genetic change into a genome without homology-directed repair, wherein the library comprises a plurality of vectors each comprising a first nucleotide sequence of a target genomic location having a cut site and a second nucleotide sequence encoding a cognate guide RNA capable of directing a Cas-based genome editing system to carry out a double-strand break at the cut site of the first nucleotide sequence.

55-61. (canceled)

62. A computational model that is capable of selecting a guide RNA for use with a Cas-based genome editing system capable of introducing a genetic change in a genome, wherein the computational model comprises a first module configured to compute a microhomology score matrix; a second module configured to compute a microhomology-independent score matrix; and a third module configured to compute a probability distribution over 1-bp insertions, and wherein the computational model computes a probability distribution over indel genotypes and a probability distribution over indel lengths for the given input nucleotide sequence and the one or more available cut sites.

63-73. (canceled)

74. A method for training a computational model of claim 62, comprising: (i) preparing a library comprising a plurality of nucleic acid molecules each encoding a nucleotide target sequence and a cognate guide RNA, wherein each nucleotide target sequence comprises a cut site; (ii) introducing the library into a plurality of host cells; (iii) contacting the library in the host cells with a Cas-based genome editing system to produce a plurality of genomic repair products; (iv) determining the sequences of the genomic repair products; and (iv) training the computational model with input data that comprises at least the sequences of the genomic repair products and the cut sites.

75. The method of claim 74, wherein the trained computational model resulting from the method is capable of computing a probability of distribution of indel lengths for any given nucleotide sequence and cut site, and/or a probability of distribution of genotype frequencies for any given nucleotide sequence and cut site.

76-118. (canceled)
